United States Patent Application Publication US 2007/0054278 A1 - sequence listing, part 68

SEQ ID NO: 95729 - DNA, 58002 bp, Homo sapiens
  misc_feature (1)...(58002): n = A,T,C or G
tcacgctgtcgcccaggttggggtgcagtggcacgatcatagctcactgcagtctcgaactcacgggctcaagggatcctcccacctcggcttcccaagtagctaggagtacagcacaggccaccatgcccagcaaattttgtatttttgctagagatgaggtcttgctatgctgcctatgcaggtctcaaactcctaggctcaggcaatctttccaccttggcttctcaaagtgctggaattaccaagtgtgagccactgcacggcctcttgatttatcttaatttgagcatgccatctgcttccagttgagaccctgactgatactcattataccaacagctgtatcagtagaaaatacgaaactcaaattatcacataaaagtgacagtttatacaaaacattttcagtgctgtgtatacaaaacttcagcaatatatgcaacattgtattaaatgtaaagttacaagactattaactgtggagagagcataccaaatcttggaaatattgaaaactccaattttttttttccccagagtttcgttctgtcgcccaggctggagtgcagcagtgtgatcttggctcactacaacctctgcctcccaggttatagcaattcttgtgcctcaatctcccaagtagcttgaattacaggcgtgtgccaccatgcccggctaatttttgtatttttaattgagagggttttgccatgttggccaggctgctctcgaactactaacctcaggtgattcgtccacctcagcctcccaaaatgctgggattacaggcgtgagccaccacaaccgccccaaaacgaatcttttttaaaagagtttttcaatgtctatttttccaatattagaaaaccatttgttgcaaaactgttggacagaatgttcaattagctgttttactgcaattcaataataatttatgagttgaattttaaaatgtataggaaggaggctgggtgcagtggctcatgcctgtaatcccaacactttgggagcctggtctggaggatcgcttgagcccaggagttcaagataagcctgggcagcaagacgaaaccccatctgtacaaaaattagctgggcatggtggtgcgtacctgtggtcccaactactaaggaggctgaggtgggataactgtttgagtccaggaggtagaaactgcagtgaactgtgattgcaccactgcactccaatctgggtgacagaatgagaccctgtctcaaaaaaaaaaaaaaaaattagaaataagacttagtaaaacaataaaagctaaatagataatatgtgaaatttatccagtagcaggaatggtccctgggacctttaagaagcagatggcggtattcaattttaagttgcttgcagagtccttgctaccccaaaccttcctgcaaatcagctacacataacagtgagtcagtgacctttaggaaagaaaagggattggggtcacggccagaggtacaatgacaaggtacaaaaaaggatagggatggatttcataacctagtttaaacgcagtggggaaataaattcaggaaataaatcaggtaagtaggagaaaagttcaccaagtacttccagagatacttggagagacactggatttcacagggacatggcgtaggggttcaatccagcttcacttctatcttaaaggtcaagttaacgagtaagttggaggactttgaaaatccaagtaaaaaattgtcactagcctgtgacaatagggatgagagaaataaaaacttcgcagttggccaaaaaggttgacagtgattctaataactgaattaaagtggtgtggcccttaaagtttatcaaattccatttattcactcataattgcactattttcatggaaagtcttagtctcctaaaacattgagaggatataccatggaactagatggcaaacttggtttggttggtttttgtaatctttaccattgctagaaagttagaaaagggtggcttcacttcagcagaaattttgaaaaattcgtggaaccagaagaaacccaatctaaaagaaatacaagagaacattttcgcagagttttaagtgcaatttcaaagaaaattcaaacttagaatcaaattcaaagaggaggcagcaccccaaagcaacattttttgttttattgaggtataatttacatacaacaaagctcaccattttaagtgtaccactagatgagttgttgacaaatgtagacagccatgaaaccaccatgaaaccagaatcatagaacatttccatcatttcagaaaattccattatgcccttttacagtcaatctcttccattcacccctgacctctgtcaaccactgagtgttttctgtcactataattgtacatttctagggctttatataaatggaatcatatgtagtcactgtgtctgatgtctttcgtttagcataatgcttttgagatctttttatggctcagtaatattccattgtgtggatgtgtactacatcttggttttgtcctttaccaattgatggatgtttaggttgttactagttttaggctatcacaaataaagctgctatgaacattcaaatacaagtttttattttaaacataggttttaaattctcttggataattacctatgagtaggattactgagttgtatgatacatgaatgcttaactttctaagaaactgataacctattttccaaagaagctgtaccctttcatacccctccagcaatgtatgagagttccagctgcttcacatccttgccaatacttggtattgccagtcactttaattgcagccatcctggtgcgtgttagtagtacatcattgtggttttagtgtgcatttccctaatgactaataatgttgagtcttttcataagcttatttcaaattcatatgtctgcttaggtggaatgtctattaaaaagtcttttgcccattttttatatcaagttgccatcttactgagttgtaattttttcagtattctgcatacaagtccttttaacagatatgttttgcaaatatttttcttccaatctgcagcttgcattttcatttctttaatggttttcataaaagagaaaacatttttaatgttgataatttaattggcaatgtttttcttttatgattcatgcttttagtgtcctaagaaagtttgctttatccaagtacaaaaagattttctcctgtgttttctttagaagttttgtaattctagctcttaaaatttagatctatattccacttcgagatgatttttgtgtatgatataaggtaatgatccaggattgttctgtttgttcttatggatattcaattgttcgagcaccagttgttggaaagactagcttactcgttgaattttcttggcccctgtttttttttgttgtttttattttgtagacggagtctcgctttgtcgcccagcctggagggcagtggcgcgatctcagctcaccgcaacctccgcctcccgggttcaaatgattctcctgcctcagcctcccgagtagctgggactacaggcgcgtgctaccacgcctggctaattttttgtatttttactatttcaagacctcttctgttccattgatctacttgtctgtctttatgtcaatttcacattgactcgattagtgtatagcaagtcttaaaaccaagtagtttaagttcttcagccttgttcttttttaggattattttggctattcaaatttccatataaattttagaatcaacttgtcaatttcttcaaaaaaatcctgctagtgatttagattagattgcattgaatttgtagttcgatttgggaagaactgctattttaacaatattgagtcttccaatccaagaatatgaatttctctacatttctacatttctttagatctttttttctcagcaatgttttatagttcagtgtgcaaatcttgcatatttttgttaaacttgtcctgttttatatcttcaatgcaattgttttaagagatactgttttctaatttgtttccaattttttattactagcacatcaactatagattttaaattraccttgtatcctacaaacttgctaagctcaatattagttccagtagcttttttcgttaagtccaatgaagacagttttcaacaaagatgaataatcatgtcatccaagaataaacaggtttacttccttttcaatctgccttttatttcttttcttattatattaccctaactagaacctgcagtactatgttgaatagaagtggtggaagcagacatcctttccttgttccaaatcttaaggagaaagcatcaatcattcaccataaagtcagtttgtggctgtttctatcttctgaaatagattatagagaattgttgtaatttcttccttaaatgtttggtgtaaaattcaccagtgaaaccatggacctggtgctttttgtttttggaaggctattatttattcaagttatttaatagatataggcctattcagattgtccatttcttctcgtgtgagttttggcagattgtgtctttcaaggaattggtttatttcatccaggttatcaaatttgtggacatagaattcatagtattcctttattatcattttaatgtccgtcggatctgtagtaatgttccttatttcacttttgatattagttatttgcgttctcttttcttgcctggttagaggcttattgattttatcaatgttttcaaagaaccagcttttgttttcattgatttttctttgttgctttcctgttttcaatttcacaggtttctgctttaatttttattatttcttctcttctgcttactttggattttctttttatttctttttatttatttatttttgagacacagtctcactctgtcgcccaggctggagtgcagtggtgcgatctcggctcactgcaacctccgcctcctgggttgaagcgattctcctgcctcagcctcccgagtagctgggactgcaggcgcccgccaccacgcccggctaattttttgtatttttagtagagacggggtttcaccgtgttagccaggatggtctcgatctcctgactcgccatctgcccgccttggcctcccaaactgctgggattacaggcgtgagccgcccagcatctttttttttttgagtcggagtcttgctctgtcgcccgggctgcagtgcagtggcgcgatctcagttcactgcaagctccacctcccgggttcaggcagttctgcctcagcctcccgagtagccgggactacgggcgcgcaccaccacgccctgctaatttttgtttttagtagaggcgggatttcgccgtattggccaggctgatttcaaacgcctgacctcaggtgatccgcccgcctcggcctcccgaagtgctgggattacaggctgaggcacggtacggggacctcatctgcatcagtacgggtgtaatcaatgatgacctgcctcttaatttatcaggtggcaaactgaggctgtgggcactgaaagagacctagcattttctagggcaccgctctcctgggtacgctggcgacaaccagcggcctcggcttgggagctgagccactggccggaatctgccgctgagcgaatgcactcgctcagacccgacttctccctctagggcgcggctcccgggcaggtcccttcacgagtcttccatccgagcagagcagggtcccgcggaggcgccgaccgggcgcgaggcctcctgcctgcccaggttccccggcgaccctgagcgaaccctctcggggtcagctccgtctaggctgagaagggaacggcggaaggcggagtgcgcccccgggagcccggagctgggactgcagctcccatggggccaagttcacggggtgcggccgcgcggccaatgagcgccctctatgccctgacggtgccccgcctcgcggcgctgccgcgctcccgccctcccgccctcccgccgcgcgctcgggatcccgaccagtcctgaccgcacgggggccgcggccacggggcgcaggggccatggtgcgcggcaggatctyccggctctcggtccgggacgtgcgcttccccacgtcgcttgggggccacggcgcggacgccatggtaagcgcggacgccatggtaagcgcggacgccatggtaagcgcggacgccatggtaagcgcggacgccatggtaagcgcggacgccatggtaagcgcggacgccatggtaagcgcggacgccatggtaagcgcggacgccatggtaagcgcggcttgcggcccgggtccctcccgcccccgactgcagctctgcgggccccgggcagcttcccgacttcgaacccattgcttctgtamagtgggaggcgcgcctgggggagacactcgcttttcatgccttggagcaattgtataagtatccagaaactttccactctcctgggttttttctttgctggagtttagaatatcctggttttacttttacgactcacattttgctggaaatggtagaatgcataataggcaatagcagcaaaatgattttgttgggttcccgccagtggaaaccctagagcacagygctcgctggcttcctctgtaccctgaacgcgacggggttggcgctgagggagaacgggaagcccggggctgggagttttgagtggtgatcccgcttccacaacttgctgtgtgacttggagaagttccagacctctctgggtctcttggacccgtctgtgtaatgaaggtgtcacagtcgggttgagaaaccaagcgcgtgctaactgcgtcacatgagagggcgctctcgtgaaattacccgcaaacacgcttagaaaggactgatgcaaatgtcagttcgtcttaagagatgtaataaagtaagggcaggaactctgactcctacctaaatattgaaggtcttttttgcttactgagggtgttagaatgtcaggccttccctcccctgcccccgtctagagcggtgtttcccaaatacagtgggttctgtgcagggttttcagggagcctgttccccactgggtcctcactgcccstcgtagtccactgatgagattggccgcgctagaaaagcagagttgtatgggtatgtagtgaatgtgtgaaagtatgctgggaagtgaggaacggcaatgttaggaaaatggttaccagtagggagggaaggaaatggggtcacggaggggaccacgaggtctctaattcccattgtaatgttttacttcctaaattgggtggatggcaagctggtgtccattacattatctatactctttttgtacctgaaatgttttataaaaatagatctctcgttaaagttattaaatgcaaaacaatgtcctttttgagattaagttcatcctgcatttttaaatttttattttattctattttatgttttaaatttatttatttatttattttgaggcagggtctcttatctgttgcccaagctggagtgcagtggtactatcatggctcacagcagccttgacctccctgactcaaccaatcctcccacctcagcctcccaagtagctgggactacaggtgtgcaccatgatgcccagctactttctgtattttttgtagagacagggcccaggctgtcatcctctttaaaatcttcatgtttcctttcttacatgatgttggtaaataacttaaacacccagcaggcaatcctttatggaactcaaaataaatgttggaaattttactggcttatagaatccaaacactcgatctcatgcaactgcctttgcctctgtgaagctttagcagctgtggctaagtcacacaatctttctaagcctaggtttctcatctgtaaaatgggtataataatattcactttatacatgtaaatgagatacctgtaaagagcctggctcagagaaggccgtcagtaaagttggctataggccaggcatgagggctcacacctctaatcctaagtggaggcctaggcagggggatcacttgagcccaggaattcaattacatgagctatgatcatgccactgcattccagcctgggcactggatgacacagtgagaccctgtttctaaagaaaaaaggaggggtggctgtaattactattcactctgaggaaactgaagcagaaggaatccctaatctagacttgactttgaatttgtgaaatgttaagacagcctggtttggctgagcgtggtggttcaagcctataatcccagcactttggaaggccaaggcaggtggatcgcttgagcccaggagttcgagaccagcctgagcaacatagtgagacctcgtctcaacaaaaaaatacaaaaattagctgggcrtagttgcatgcacctgtggtcccagccactcaggaggctgaggtgggaggatctcttgagtccaggaggtcgaggctgcagtgagctgtaattgtgtcactgcactccagcctgggtgwgagagagagaccctgtctcaaaagacagcctggtttactgtagaataattcaagaaatggaatttgcctctgggcctgagtgatgtctaacacagggtaaggagacattatctaacacctgtattgcaagctcataaatacttaagcattttatcttggggagatagggtgtatgttgtgtgccagctctcaagtgccttcttattagaatgagctgttttgcagttcaccatggagatggcttcacatgccctcgaggcatgctggaccatcagcacttagcaaagtgagcctccctgatcagaagtaggatattttcaagaaagagcaataaagctgtcctcaaaatctgctaaagactcctgctttttttttttagacagagtctcgcttgttgcccagcctggagtgcagtggtgcaatctcatctcactgcaacctctgcctcccatatgcaaatgattctcgtacctcagcctctggagtagctgtgattacaggtgtgcaccaccacacctggctaatttttgtattttkggtagagacggggtttcamcatgttgtccaggctggtctcgaactcctgagctcaggtgatccacctgcctcggcctcccaaagtgccggattacaggcatgagccactactccgggcttacctccttcttaatctgaaatctacttctgttcctttcttctctgtgaattgcccttgttatttctccttcagctgtccttaccctcagatacgttttccgctgtcggcygcctcttcttcgtgtgctctctcccctcgtggcctcctgcctttctgacagctccttcttcctccactggccccttcttccctctctgaggctcaggcctcagtgtctttccggtctccctacacactcccatgaagaccctctccrcattctgacttcggtgccaccctttatgccggagactcccagatctcatttccggatctgcctccttaacttataggtctggatacttcctgtttggtttttcaccttcatgctaaacgcagtttgtctaaatcggaagtcaacttccattctctgccgcccctccctcctgacccatgttggatcattccgctaatcacagggacccaaaagcttcgagtcacttttggctcatctcgtcctgttgaccctcatctgaggcttcagtgcaaggtttcctttttccattgcttcctcttcttggaacccagaaactgccgatgggtctttaattcttggagtctccttctcagcctcatcgctcaactccttcaggaacccaatggctcagccaacccaggtgggcaccaacacttgaatacactccagtctctccctcttctgacccctttactttctgcactgctgctgctgctaccttgcctgagatattcctccctcccagactcttcactccccttsccactgctgaggagctccccttccttgaccggccagctcacattctgtcttcatcataaagcgctctccctcttcaagaagcacattcagctaacagcgctctctgccagtcgttcatagtttgcatccctcccaggccttagcattttctgccttatattattaaggtttttttttaaccatgtctttttatttatttattttagagatggggtctcgctttgttgcccaggctagtctcgaactcctgggctcaaacaatcctcctgtcttggcctcccaaagtgttgggattacaggtatgagccagcatgcccgttctataagcaggtcttctcaaatgtaacctcctcaagggcagacgtatctgtaaccccctagcaagctgcaccagctctgacacgtacttgrtgctcagcgatgcatcacactgatttcctgccactggactgtgataccagactcagggctcccagccatcacatacagctccctcagccacgacaccccaatacagggatttaaaatctgccttcataatttacttgtggccgggcgtggtggctcacacctgtaatcctagcactttgggaggccgaggcaagtggatcacctgaggtcaggagttcaagaccagcctggccaacatggcaaaatcccatctttactaaaaaaaaaaaaaaaaagctggtcatagtggtgggtgcctgtaatcccagctacttgggaggctgaggcagaagaatcgcttgaatccaggaggcagaggttgcagtgagccaagatcatgccactgcactccagcctggagaacagagtgagagtcagtctcaaaaataataataataataataaaacattatttacttgtggtgtgaccttttgtaaattactaaagctccttaaaacttcatttcctctttaataaggataagagcacctactttataatattgttataagattaaattaaaccatgtggagctcttagaatatagtgtgtctggcacaataaatattatagaataataacagtaataaattttcatagccttatgcacaattcttctttatgaatgcattcacatcttctgcctggctttttggagtctccattattccatgacatagaacaaaacaaaaaatkagtgaattaatctcgaagctttacttcttcattttcccccactggtgtstgaacttttgccartgtattttcagccctgctataaactgctataagtgagatcactccaattttatgcaacagttttctgaacctttggcttgttcaatttgaagctgcttgtgaatgtaactttgttcaaaaagctgacagagatagctgcgagtgaaaactccttggcttaaaattgagccccttccgggcatgatggctcatgcctgtaatcccagcactttaagaggcccaagcgggtggatcactagagctctggagtttgagaccagcctgggtaacatgcaagactccatctctatttttttatttaaaaaataaataagtaaataaaattgagcctcattttttaacctaattgaaaatgggtgataaaaatgtatacattgcgaccaggtgcggtggctcacacttgtaatcccagcactttgggaggccaaggcaggtggatcacctgaggtcaggagttcaagaccagcctggccaacatggtgaaacttcgtctctattaaaaatacaaaaatcagccaagtgtggtggcacrtgcctgtaatcccagctacccgggaggctgaggcaggagaatcgcttgaacttgggaggctgcagttgcagtgagctgagatcgcaccattgcactcctgcctaggtgacagagcaagactctgtctcaaaaaagaaaaaaaaaaaaaatatatatatatatacatacattgctcttgttgaaacatttkggatctttcaggaggacattccttttctccattcagagccctttgttttctttggggtatagcaacagttccttctatgggagctcttgtggcacggcccctgtggcattgtctgtcctcatgtgacatcattctcatggttcttttcgggtttctcacactggcattgtttcggcggggaactcntctcctgcagcacacggamcctgactactcggctgcctatgtcgtcatagaaactgatgcagaagatggaatcaaggggtgtggaattaccttcactctgggaaaaggcactgaagttggtgagttgaagattctctcgaggttccagaatgcttaattttcagatgagattctaatttagattcttagattcattagaatcttgatttagattgagttctgatcttgtttttatctgtatttacactgctcaaagtgagtaaaaagtttcatggtttgttacttgtttcactgggagaaatttaaaagtgacagaatttggcctctctccttgcaatcatctctagcctgttagaaaatccttggctgttagtctgtttctytgtgtcaaatgacagctacaagrrtgcttttcacctgcctttcacccggggccactgtcgagctttgacaacctgtagtgggcgagtaaccaagggcaatgagagggaggagayatgagttcccatagcaaaaaaggctcattgtgatgtgcacagcamgtctactcgcttttcaatatatatatgtatatatttttgagacagagtctcactctgtcgcccaggctggagtgcagtggcacaatctcagctcactgcaacctctgcctcctgggttcaagcaattctcctgcctcagcctcccgagaagctaggattacaggctcccaccaccatgcccagccaatttttgtatttttagtagagacagggtttcaccatgttgrccaggctggtctcgaactcctgacctcaaatgatccgcctgtctcagcctcgcaaagtgctgggattacaggtgtgagccatcacacccggccttttcaaaatatttcacaccaaatcggtttcmagttcactattttcatggcgaaaagggctttggcccygcccaatctcggaggtctcccttggggaagagcagattctttaagatgcatactgagccrtgtatacgtcattctttttttatttgcattttctattttcttaaacagaagacacagaacataacttttttcagagctggatgtgatctcaaatggtgatcttgagccgtctcattttttagagagaagaaaactgaggcacagacagctacccagcaagtcatggcagaaccacctgactgcccagagcactttctcttcagaacttttaaatgcaactctttttgaatacataatacttacacatggtacaaaattcaagaagtccaaaacagtggccttcgccagatcaatttcagtggattattagagcctgaagccaaattatgatagattgaagggtaagggtctagaaggagggaaaagagtttctctaacttcggtggtagtgtgatacctctcccttggatatttgcaccatcagcgctctcagtagttgtagaaaaaaatcttggcccattgagagattttaaattgttaagcatataaaagaagtgtgtgagtttgtgartgtgtgtatgtgcgaatggcaagggaaccttccttgaactttcaatggacactgcccaggtggctgctgttactgctcttcacagggctggcggtcagttgtccagcaagtcagtccttctgcagacttctgagtgctgccatgtatcaggcaccaaagtaattttaaaaagagaaagataggccrggcgtggtgattcaggcctgtaatcccagcactttgggaggctgaggcgggcagattgcttgagtcaagcagttyragaccagcctggtcaacatgstgaaaccctgtctttactaaaaatacaaaaattacctggccgtggtgatgcatggctgtaatctcagctactcaggaggctgaagcacgagaattgcttgaacctgggagttggagtttgcagtgagccgagattgcgccgctgcactccagcctgggtgaaaaagcgagactccatcccaaaaaaaaaaaraaaaaagatacagaagacagaatcccacatacaaggagcacacgaacttattggggaagtagacataaaagaaatgatcatagtgcagtctgagaattactgttttttaaaactatgtacaagttttacagagagaggatatattaggctgttctttttttttttttttttcttttctttttggaaacaagagtcttgctctgtygcccagcctggagtgcagtggcgcaatctcgctcactacaacctccacctcccgggttcaagcaattcttatgcctcagcctcccgagtagctgggattacaggcacacaccaccacgcccggctagtttttatatttttagtaaagatgaggtttcaccrtgtttggtcaggcyggtctcctgacttcaaatgatctgcccaccttggcctctcaaagtgctaagattataggcatgaaccaccactctgagccaggctatttttgcattgctataaaggagtacgagagactggataatttataaagaaaaagaggtttaattgcctcatggttctgcaggttttacagaaagcatgatgccagctactcagcttctagggaggcttcaggacacttacaatcatggtagaaggtgaagggggagcaggcacgtcctatgtcgaaaggatcaagagaaagggaatggggaggtgctacacacttttaagtcaccagatctcacgagaactcactcactatctcaaagacagtaccaatgggatagtgctaaaccattcaggagaaatccacctccaagatctaataatcacctcccaccaggccccacctccaacactgsggattacacttcaacatgaaatttgtgcagaatgtctaaaccatctcagggggtaacttcactctgtccaaaaggctcagggaaggcttcagagcagaagtaatgctttgaggtgagtctcgaagagcaaacaggaatttgccaggcagagaaagaccatgctgtgagtcagtcccgcttttctccattaagtaaacaatttactgttaaagttttccccagagtagtaaccacttactaagacagagctgtgagctgtttctgcttcttctgcaactctaattgtcccttgtttgtaagttgagtactttatgaagccgctgcctttctccatactgcaaaycctacagcacagcccccaaaggttgcataaaactcagcgagcttacaagataatgttaggccattggacccactctctgttaacagcccagactttaaactttgctgacttgggcacacgtggaggggccctgggcactaagatagataagaagcccttctgggatgggtgctgagctcagtgtttagggccttcacttcccctctcctcctccattcccagccccacaccgctgtcttggtggatgtctcaggcacggataaatcaacttccatctctccatgactttaattaatgactcttttgtgctaagggttttggcttcctcctttttcagaccacaacatgacagaacccattttaactttaaccttgctacatatttcaggtgactcactgcagtctcactaaatgtgttacacagcactcacactaaagatgaaaaattccattagctcatcctggttcttctgcttacttacctaatcatctgtttatgatttaaaaaaatagggttactgtgaagagagtgcttgtgtgtgagacagagagggagggttgtttttcaaatgtatagaatataccaatgtagtttttggttgggtatttttttaaatcatgactttattaaatttacttaattaatattcatttttatcctttttttatgtttttaaagtttttattatttattaatttatttgagataaggtcttgctctgtcacccaggctggagtgcagtggtgcaatcacggctcatacagccttgaccttccagactcaaatgattgtcccacctcaccttcccragtagctgggcccacaggcacaagccaccatgcctagctaatgtttcttttttttgagagacagagtctcgctctgttgcccaggctggagtggagtggcacattcttggctcactgcarcctccacctccaaggttcaaacgattctcctgcctcagtttcccaagtagctgggactacagatgtgtgccaccatgcccagctaatttttgtatttttaggagagacagggtttcactatatgttggccaggctggtctcaaactcctgacctcaggtgatccacccactttggcctcccaaagtggtaggattgcagatgtaagccaccacacctgacctgggtttttttttttttttttttttgagatgtagtttcgctcttgttgcccaggctggagtgcagtagcacartctctgctcactgcaacaaccacctcccaggttcaagcgattctcctgcctcagcctcccaggtagctgggactataggtgcctgccaccatgctgggctgatttttgtattttttgtrgagacaggatttcatcattttgcccagactggtcttgaactcctgagctcaagcaatccgcctgcctcagcctcccaaagtgatgggattgcaggcataagctataagccaccatgcctggcctgtttctgtttttatttatttatttatttatttatctatgtatttatttatttttgagatagagtcccactctgttgcccaggctggagtgcagtggtgtgatctcggctcactgcaacctctgcctcctaggttcaagcaattctcctgcctcagcctcccgagtagctgggattacaggtgcccactatcacgccagctaattttttttttttttttgagayggagtctcgctctgtcacccaggctggagtacagtggcgcgatctcagctcactgcaagctctgcttcctgggttcacgccattctcctgcctcagcctctccagtagctggactacaggcacctgccaccacgcccggctaattttttttttatttttagtagagatggggtttcaccrtgttagccaggatggtctcgaactcctgacctcaggtgatccacccgccttgacctcccaaagtgctgggattacaggcgtgagccaccgtggccagccttttttttttttaagactttatttttttagagtagttttaggttcacagcaaaactgaatggaagttacaaagatttcccacatacccctgtccccacacaggcacagcctccttcattatcaacattctgcccagagtggcccacttggtacaactgatgaacctgcattggcacatcatgatcacccaaagtctgtagtttacaataggggtcactcttaggtttggacacatgtataataatatgtacaatgtagactaagttagttttttaaaaaatagaaaaagatgtacaaagaaagaatttttaaatagacaaaatttttaaaaatccagccttaagagtttatgacaccactcttacttcagacacccacaagtcacccacagactttactcaatgtccttccagtgctagaggctccagagaattgaagtccctgagcagatagaatcacaagagaaaaccccccgggtttagttgccaagaagctgctttcaagggccttttttttcttttccaagtcaatttcctgccacagccaaaatttctctygttttttttttttttttttttttttgaggcagagtttygctcttgtcgcccaractggagtgcgatggcgtgatcttggctggctcactgcaacctctgcctcccaggttcaagcgattctcatacctcagcccccacaagtagctgggattacaggcatgtgccaccacacccagctaatttttgtatttttagtagagacagggtttcaccatgttgatcaggttgrtctcatactcctgacctcaggtgatccgcccgcctcagcctcccaaagtgctgggattacaggcatgagccaccgtgcctggcctcacaacccaaatttctattgaatgcgacaaattctagtctcctgttgagcaagaaaaatccatacactgtagatgaatacataagtgctgcttgtgcactctgagagtcataaaaatgagatcatccttagcttttgttaagtgcatttggtattgtgacatgaaccagaggtatgcttcagtcaatgatttatagcaacaatcaaatccttgagacggtggtttggtgtcgataataacgtacctcactgtgagtcactgacttacttcagattttctttaattcaagagcatcaaccttcaagaagtgaggaggactctgtcttctcacaattctagggaatgaatgtctgaaccagaatgattgtgtatcccattaacaaaagccctagagaacctggaatggctggttcagccctaaatgctacatctgacctaaagtgtgcaatcatccgagagctgtttcacccttagccaggcatgtgctaaaagcttggggcatcactttctttctttttcttgagatggagtttcgctcttgttgcccaggctggagtgcaatggcatggtcttggctcactgcaacctccacctcctgggttcaagtgattctcctccctccgcttcccaagtagctgggattacaggcacctgccaccatgcccagctaatttttgtatttttagtagagatggggtttcaccatgttggccaagctggyctcaaactcttgacctcaggcaatccaccggccttggcctcccaaagtgctaggattacagacgtgagccaccgcgcccagcctggggcaccactttcaaactgtccttctcaagatcttattgacagtaaaactgtacccctacaactgtcctattaaatgactaaaaacttttactattgaatccacggcagcaccaaacaaattaatcaaaacgttttggaatacattcctttctttgaagctaagttgatggcttgattcaattattgtgtccatttacacaacgtaggctaaatgtttcctagaattggcaaaggatcaaagggttactttacttattcatcatcttaaataacccaagaaagcctttatattattattattattattattattatttgagacagggcccagctctgtcacctaggctggagtgcagtggcacaatctcagctcactgcaacctctgcctccaaagctaaagtgatcctcctacctcaagtgatcctcctacctcagcctcccgagaggcggggaccacaggcgcaccaccgcaaccggctaatttttgtattttttgtagagatgatgtcttgccacactgcccaggctggtctcaaattcctgagctcaagtgatccacccacctcagcctcccaaagtgctggcattacaggagtgagcgccaggtccaagaaatcctttcaaagtaaaataccacaggacatggtggctcacacctgtaatcccaacacttmaggaggccgaggtgggaggattgcttgagcccagagttccagaacctccccacccactgccccatgcaacatagcaagaccttgtcactacaaaaaatttaaaaattagctggtgtggtgttgcgtgtaggtcctagctactcaggaggctgagacaaaaagattgcttgaggctaggcattcaagattacagtgaggtgctgggtgcagtgtctcakgcctgtaatcccagcaattttggtggccgaggcaggtgtatcacttgagctcaggagctcgagaccagcctgggaagcatggtgaaaccctgtctctaccaaaaatacaagaaattagctgggcatggcagctcaagcctgtggtctcagctactcaggaggcggaggtggaaggatcacttgagcccaggacgcagagattgcaatgagcctagatcccgccactgcactccaggctgggtgacagagtgaaaccctgtctctaaaaaataataattaaaggtaccaaaaataaataattgatggtaatgcygacccaaattaaatttaaccttcaaattacttatgaaaaatgtagtatatcataagaaagtcaatagtaagaaatttcatgttaagacagtgttttcatatattttaacattttacatataaatagtatgctaattgcaaattcattttatttaatgtttaatagtttatgttatgaattcaaggcattttctatacttgtcaataatgaaaaggcatttctccttttaaaaattctatgaagtcagccttcttattccttaggaacatgaactagygtggtttggttttgaatctgattgttcaaacactttacaaagtgaataggaaaataatttgggaacatttatatttaaacttgtcaatctatgattctgtttttcatgtgacagccaatcacaatgtgttctctactcaggaagtttagctcagtatatggattaacacgtgttctacttgtgtgatatttcttatgacaaccacagaaaacatatggggctgggcacagtggcttatgcctgtaatcccagaactttgggaggccaaggcgggtggatcacttgagcgcagtaatttgacaccagcctgggcagcatgtcgaaactgcgtctctacaaaaaataccaaaattaaccaggtgtggcggcacatgcctgtaatccyagctyctcgagaagytgaggtgggaggattacctgagccggggaggtcaaggttgcggtgagccgtgatagtgccactgcactcaagcctgggtgacagagtgagaccctgcctaaaaaagaaaagaaaagaaaagaaaacatatttgatgcaattttaaaaagaatatacctttgagatagagtctcactcttgttgcccaggctggagtgcagtggtgcaatctcggctcactgcaacctctgcctcctgggttcaagcgattctcctgcctcagcctcctgagtagctgggattacaggtgcgcaccactgtgccctgctaatttttgtattttcagtagagacagggttttgccattttggccagactggtctggagctcctcatctcaagtggtcctcctgccgtggcctcccaaagtgttgagattacaggcatgagccaccgcgcctggcctagatttaattttttcataaaactttcacatttgtttgtttgtgatgttttcaggtgctaatttcttgacctagtatagaagcataaacaagagttcaatcctttttaaatagttgtctgtgctgtgaatgccctcgcccaccatgtgctcaacaaggacctcaaggacattgttggtgacttcagaggcttctataggcagctcacaagtgatgggcagctcagatgggtaagggacctattttgtaaaatgcttacataagtaatattaccaaggtctgagatgtcctttgagtgcaacgaatgtgaaaatagagatgggtttatttatttgtttatttatttattttttgagatggagtctcactctgtcacccacgttggagtgcagtgatgcaatctcggctcactgcaacctccgcctcctgggttcaaacagttctcctgcttcagcctcctgagtagctgggactacaggcatgcactagcacacctggctaatgtttgtaattttagtagagatggggtttgaccacgttggccaggctggtctcgaactcctgacctcaagtgatccgccttcctcagcctcccaaagtgctgggattacaggtgtgagccaccatgcccatcctagagatgtgtttataattttaaagtaaaacattttattcagttaaattcaggcttgagtcatttagatcatcagtattttgaggtraacaactcatttctgtaagactgatgatctaaatgactcaagacygaatttagctgaataaaatgttctactaaggagatgaggtcctgagatttgggtcctragagctatctcttctctaaggacctcatctcctcctccctgaattggaaagtgctctagaggataaagtactaaatgggcaatctctttatggagaaataatgtgagtagtrttagagatgtaagagaaggtcaggccgggcryggtggctcactcctgtaatcccagcactttgggaggccaaggcaggcagatcacgaggtcaggaggtcgagaccatcctggctaacatggtgaaaccccgtctctactaaaaatacaaaaaattagccgggcatggtggcgggcgcctatagtcccagttactcaggaggctgaggcaggagaacggcgtgaacctgggaggcggagcttgcagtgagccgagatcgcaccactgcactccagcctgggcaacagagtgagactctgtctcaaaacaaaaaaaaaaaaaaaaaaaagagagagatgtaaaagaaggtcattaaagagaaaacattaagagaagagcaaatttaaaaagatggaagaccatggtaccttttatgtgtttggtatttgaactataaattcaaggcatgaaaaagttaggctctggagaaaggattccaacacaataaggtgaattcaataccctgacctttgcctttgtcccgtgatactggattttgtcttttcctaacccggcttagtctcccatccatgcactgagaagggcacaagagaatgtactttcaatagtgcctgggatttcatcttttactttatacagagaatattaaacttaccttgaaagatgtcaccttgaagaagttcccattggctgaatctgggacaatttgaacatccaaataaatatgatagtaatggcttataacccattgaataaaatccatgagtccattcagataatgaacaatcagctgggcacagtagctcacgcctataatcccagcaccttggggctgaagcaggagaatcacttaaggccaggagttcaagaccagcctgggcagcatagttgagacccccgtctgtactttttaaaaataaaaataataaaataaaaaatttttaaggaggtaataaacaacaaggtcaagcccattacagctgattaaaatctaataaatataaaaggaatgataacatcagaaaatcaccataactgtcatagctacaattaattgaggcaagagtcatcaagggatgcccaaattttgggacaataataacctccttacttggaaaatgaaatggtaacttcacagtggagaaagcaaatggacactaagttayccaagtggtaaaagttaacaatcctaataataaaacaaaatgacataatcacttatgtagtattgatgccaaaaaatgtattacctgaatctagtcatgaaggaactccagatcagcccagattgaggaatgctgtacaaatcaagtggcctgtactcttttaaaatgctaataacatttaaaaaagaagaagaaaaattattccaggtaaaaagagactaaagaggcatggcgactaaatgtaatacgtgatcccagatgggatatggattagggtaaaataaaatacattattggaaaaaactggtgacatttgattatggactggcctttagayagcaatattctatcaatgttatattccctgagtgtgattattgtactacggttatgtaagaaaatatccttgttttcaggaactatacactgatgtatttagggttaagagagcatgatatttgcaactttattcaaatggttcagaaaaaagaagtacatatgtgtgtgtgttcatatgtatatacatacatatacttaacatatatatagagagagagaaagaagagaggaaaacacaggtgtttttcctgctattcttaaaactcttcaataggttagcaactgttttttttaaacttaacctttaggtgggtttctattgctrccttttaattcttgagatgtgtccytggacggaagacctaaatatctttctctctctctctttttttttttttttgagacagagtcttgctctgttgcccaggctggagtgtagtggtgcgatcttggctcactgcaacctccgccttctgggttcgagagatcytcttgcctcagcctcctgagtagggactacaggcacaaaccaccacacctggctcatttctctgttttcagtagagayggggtttcaccatgttggccaggctggtcttggtcccaaagtcctgggtttacaggcatgagccatcacacccagccctctttttcatttctaaaaagtgcttttgtactttgcttcctaaccagattggtccagaaaagggcgtggtgcacctggcgacagcggccgtcctaaacgcggtgtgggacttgtgggccaagcaggagggaaaggtaacccctctcacaaacgctcaggaggctcctgggagctgyacgacactgactttccctacgcacagaggaaagacagacacactgcagcccccaaaaggaaatacagataattgctttggtgtttttttctcctctgagaggttttggcagtaggtagggaactgcaggaggaggagaaagaggagacaggatggcggaaggcgcaggcagcagtagaggggggtgtggggacctggtggctgacagccagcattagagctgccaacgygtttactgtcaggaaaaaatggggactttacacatatgtcttacaaatcctttcttttttacttcaagcctgtctggaagttacttgtrgacatggtgagtagcattgttaatgttacaattgtttctgtaaatgaaatggatatcatkgwtgacatgccttttgatgatcagtaaatatattcaggactatctgttgatcactatagcratgrtaaagcaaaaagccaataaaatatgacattccttttctgatatctgacgtaacagatggctgtgctcatgcaggcagggtggcatgaggggaagcagtgagggggtcctgcctcccccactgtgcatgtgtaacacacggtgccagttctctgagcctccattgcctgactatgacaagaggatcatcctaacttctctaggaacctcacaaaattaaagatcaatgagaaaagcacctcataaactctgaaaagccagatgttataatattatgaagatattatccaggccaggcatggtggctcaagcctgtaatcccaatactttggaaggctggaggatggcttgagcccaggagtttcaggctgcagtgagctataattgcaccactgcactcaggtgacagagcaagaccctgtctcaaaaaaagaaaaaagaaaagatactatccagtcactttgacaccaagaataagawcaggccattgtagcckctactgtacaattccagcagggaaggagctcaacactgaattctaaagctatgcacttgactgttttctttctccttgaccttttcatagcaggggtgaacaactggatgctgaggaggaaaaaactgggcaaattaaaggggaatgagcttcagaccccatgcagagctggctgtgagtccgggtttcactgctcaccagctgcatgaccttgagcatgtgacttccccactctgagctgcggtggcctcagtgcaacacctgggtggcggttaaaaacctcgtgatccacaaatgaaggcccttgttattagttggcaaaaaattaaggaaaaacaaagaacaccatggccttgaagagtgttgggcaggagactgctcctcctccggaggaaagtgaagacaggaggctgtcacatcgtctctgacatggagagtggcttccgggccatccgtagggraaggacacagagctcttgagcccccttctagattcaaggttggcgttttacggggatggaggaggtagccaccaaaagggaatgatttgcaggccaccagaaatgtgcctgaggtcccacctgtggaccctccatttttggatcctgttccctttcaatgccagtactcttttcttttttctttttttctttctttcttttttttttttttagacggagttttcttcttgttgcccaggctacagtacagtggcatgatctcagctcactgcaactgattcaagcgattctcctgtctcagcctcctgagtagctgggattacaggcacccgccaccatgcccagctaattttttgtatttttagtgaaaacggggtttcaccatgttggtcagtctgagctcgaactccggacctcaggtgatccacccatctcagcctcccaaagtgctgggattacagatgtgagccaccgaacctggcccagaactcttagaagtagaatctcagggttgaaagagtttttaggattttcgacagttatggtagagtattattggtcactataagwtgttagtgggaatggaactactggctgttttccaactgactgttccgtcagggtggggagaggtctcagcacgaggccccgccgaaatgttggtaagtggtcagccaagtgggccgctcactcccggttcacccactgtgttyctgtcagtgaagyaaacatccccatttgkcaggagaagaagctgccggaggtcacactgctagtgattggtggcccaggggtagggcagccttctttcctctgcagttcactgctccagaaccatctccagcctcatagctcaccgtggacagccctgcggtgtggcgctgatgtacagagtgatgccaggcgttcatctccccrctgagctcctgctgagtgtttgcctggggccaggtcctccttccgggaagtcattttagctggaaagaacagggtgggggcgggtggcaagggatcagagcatgagcgtytgagggcttcgtcaggggcagtgaggagcctctaaaggactctacatttaggaatgacagagtcaaacaatttaacaaagccctaaaggtccctgccaggaaagaatgagccccatgtatcaccataagcaacttcttagaaacataacccacccctgtcatcccagcactttgggaggccaaggagggaggattgcttgaagccaggagctcaagatcaacctggtcaacatagtgagaccccatctctacaaaaataaaaataaattagcygggcatagtggcacatacctggagtcccagctactcaggaggctgaggcaggaggatcacataagccrgggagactgaggctgcagtgagctatgatggcatcactgcactccagcctgggcaacagagtgagaccttgtctctaaaaaaagaataataaattttaaaaaacaaaatataacccaccttataattgattcasgcctcttcccctcctgtcacgttgccaggatcccaggaygctggtatcctgcatagatttcaggtacatcactgatgtcctgactgaggaggatgccctaggtgagtttggaagctttctgggatacacgaygtgcacacacagtagtggcatgctttgtttcctaaaagagtgagtgatgctttttatttcttccagaaatactgcagaaaggtcaaattggtaaaaaagaaagaggtgggttgtaagaaaattttcttcattgtttttgctaacattgtccacttttgagtgcccctgtccttttggggtacacattgtcttcccaaatgccctgtgctgagcagctaggccctcaaatcaacattcaagtctgcatggtgaagcctgctgggtatgacctctgactgcagagtttgcttcagccactgctgaaaggaagtttggctttaggattacactgtagggagagccctgggggagcagggcagtccrtgagagtatcctgatcacctgggtttgacatcctagtaatttgtggctgggtgtgtgtgtgcagggccggatcaggagaacagctggactctccaggggaaacagcttagctacaggcacwtccaattccgaagggccctggaaagtgcaaaatgttgacggcgctgtgttttcacagagaagcaaatgctggcacaaggataccctgcttacacgacatcgtgcgcctggctggggtactcagatgacacgttgaagcaggtgggcattttaacctggctttgtagacagctgaatggggagaaaccaacctgtttttccttctgtcctcataccactactctcagtacctcacttctgacaccagatgtgtrtggttttccttctcacgccaaccagttctccacttctctgtggacaccaactgggtgtcctgctattttactcaattctgacagcacatacctggaactagcctcagaccccacaggttaagggctcagtcttacaggrctgccctatggcagatgccagtcacaagtccacgttgtcacctgtgcttctgactggctttgcctcmgattagaggttcccacaaaccccgctttgagttgaatcatttggtggaatggctcacggaattcagggaaacactacttatgtttactcatttattataaaggatgcaacttaagaacagccaaactgaagagacacacagggcaaggtgtgaggagggggtacagagcttccatgtcccctccaggtgagccacactcccagtacctccacgtgttcaccaacctggaagctctctgaaccctgttccttgggggttttatggaggcttcagtatttagatgtgattcattatttggccattggccatcaattcagccttcagccccctcgcctccccagctatctgggaataggctaaagtttccaaccccacmatcatgcctttcaggtctttctggtccccagccccrtcctgaagctacgtaggggacctcagcagggctctctcrttcacgtacaaaagacactcctatcactcaggagatgccaagggttttaggggctgtgtgttgtgtgttaggaaataggggggcagcgatgggggcagagacaaaatatatattccttcttatgtcacatgggcttttgattccagcctctctgggagaaatttaatactttcctgttcacctctctaaatcattttggctgagggcagtggctcacgcctataatcctagcattttgggaggctgaggtgggtggatcacctgaggtcagaagttcaaaaccagcctggccaacatggtgaaaccccgtctctactaaaaatacaaaaaattatctgggcrtggtaatgcgtatctgtagtcccagccactcaggaggctgaggcaggagaatcacttgaacccaggaggcaggggttgcaatgagccgagatcacgccactgcmctccaacctgggtgacagaacaagagtccgtctcaaaaaacaacaaaaaaattattttggatccaagccctcgttctgaaagtacacaagcaaatgcaaagccattcattttgtggaccgcaggactctgtgacttagtgagtcaccttgggctctggaaggtgacagcctagggtaagattcctgggcagcaccagcggtagacccactgcgagattgagaagtaatgcctatttcatggggtggttttgaggattcagatacatgctgtaagttgcgtcatgctcaaggcaccatggctggcacatggcatgcagtcggcacatggtggatttattactgtttctccttacactgtgcccacttctagagagtggagagagaggctggcttctgcatgttactcttatatccactcattctatggatgccacagaatattctagctttaaaaagagagagatcagtgctatcttccccttccgggaaggttgtgaccattaaaaaaatggttcccatagagatgaggaaagaaagtcaccctacaagtaaaaagtgatctctgtcagccaggctgtttctgctgttaatttcaacaacacatgggtgttactctggtctrtgctataaccgtaatgcttgtgaaacagatcagcaatgactgacttcctggtcagaccaaggggctctctccagtgtgtgaccctgtgctcctttcccacagctctgtgcccaggcgctgaaggatggctggaccaggtgagtgtgatgatggacctgactttcccagttggcggcaggagagactcaggcagtaagtctctcctggcagggagccaaggagtaaaaggcacccacgggctaggatcmccctggctcatagggatgcatragagaagtttccycttaggccaggctctttctctaaaggcaggatgtgagtcctcattagaattataggccatcagagttgaaagaggcttgggagattgtttatttcgggcactaacctagagtagaaatccagtctttactgtcagtaacagcgttgattcagtttctgcatgaacatctccagaggcagcgagcttaacttggtgaggcactttccattctttgagggctttgagtattaggtgggtcttttcttctcttttttttttttgagatgaagtttcactctcgtcacccagrctggagtgcagtggcgcaatctcggctcagtgcaasctccacctcccggattcaagccattctcctgcctcagcctccctagcagctgggattacagacacccgccaccacacctggctaatttttgtatttttaatagagacagggtttcgctatgttgatcaggctggtcctgaactcctgacctcaggtgatccgcctgcctcagcctcccaaagtgctgggattataggcktgagccactgcacccagccaggtgggtctttaatatcagcaaccctttgcttccatgtaatttccagccagaggtcccagttcccaagagccaggctgttcctcttccacttgagtgccctcctctccctccaggccacctcctttccacactgctcatctgcacttctcccttctgactctcgcctgtgcaggtaaagacctctggccatcmtaagaccttctctggatgaacctcgatggttgatgaccctgcatcctgaaacagggcaggatgcagagggaccatcatctcttttgacccagtcactgtgtgtccctcagcacagctcacggtggcactttttgcctgtgacatgtcaccaggcttcctatctgacttgcagccactctggtctctgagcctcctgctactcagtgtgtcctgtggagcaggagctccagcatcacctgggagcttgtgagaaatgcagcctgggcctctccccagacccgctgcctgggaatctgcattggaacaagatcccctagtgattcctatgcgttcttaagttggagaggcactgaattcttgttaatgcctcagctaaataaaggcttgaggagtgagaacttgaaggaggcagcatgaagcygcggaaagwggtgttggcatctgatagaactgaaatcacatcttgccttttcccctcatccsctgcaagtacttgctgtgtgatcaattactcaacctctctgaacttcattttctctcagtagaaataatatgagctttggtcctcctcmaagttgccatatctcagaaggaccagcacagggcaggattcagagcagctgctgtaagtbctgtttgccctccctctgcatacccgggggaggctgcagcartgtatctggtgagtcagagaaggctgtggggagatttaaagggtctcttcccagcacaggaagcctggcacccagagcctaaggccagccaccctctctggagcatcacggatcatgtagttgaagcctccagctggtacagaagagaacagcaggtgcctgagaatgtgcggcactctgcaagctggggctctttgcaaagcagcaggrggacctcagccaaggaggcgcacarggagggtaggctgctgttcgagggggcagatgctggcctccccgtggtggtgtcccctcctccacctgccagtgcccacactgaggccagcaacacactcttctgacagcagagtcatarggtgtggacatagaggcccatgtctcaagagaacagctggacatccacagagattaaggagctccctacaagtgtctggatgtggtgtaaaggagacctctgcacggaggctccagccgcactctgctattccctagttacctgatctcatcactttccctcccggaacctcaggcccctgcactgcaggggacagaccatccctgtggccttcctctcactgagttaattcaagacaaagctctcctttgtaaaccagaccctttccattcagtctatcacagtgtggctyactcggcaccccttttcagccccgctctcctcttcagttctcactgtggcttttttgttcttaattccttttcatggcccggcaaaaacggagttaattatattaaagacctgacttccctgtctagctccttaactccaggtcagcagataattgagagtcattgccctgatactgaatgaagagataaagttcccaggtttatttcaagtgacttatctgaagatgaggaaagagcaagaggttactaaaaaacatatctgtgaattgttgacagagacggtcacttctgcagaaactccagatgcccttgccaagtccaggtacaggtctaaactagcaaaccaaatgcattttctaggtttaaagtaaaggtgggtgctgatctccaggatgacatgcgaagatgccaaatcatccgagacatgattggaccggaaaagactttggtaaatatcctctcacaccactaagaagcagtagcctttgtccagggctaaatacaactcgtttcaagattaaagaacattgggaatttaaaaagttaattgtcagaggaagtacacttctrtngtcttgcagtaggcgagctcaaacaaaaataagcaaagggactaatagttttacgttttttaattctgcagaactagttaagtaagtttggggttaaggatcctktcttactaacacagatgtacctgagcaaacagttttcccattggtgctctggtgtgtcaatcatgtaatctcccctcctagctcctcaggtaggagggtgtcagggggccattactgmagaaatgttggaacttcagctgagataaatgtaaggatcagtcatttctgatttgtatttttrtaaaccagttcttacgtgtaaaatattttcataaagtcacagtaagatgtttttatgaggcttyggaggcttttttgcataagttaaaatagaaattttgagttcttgacccaggatcactatttatacatgaattaatgctgctttttttttttaatgaagtcatctgtatccaaataacttatgataaaaattgattctgggctggccagatgctgtggctcatgcctgtaatcctagcactttgggatgcctaggtgagtggattgccggagctcaggagtacaagatcagcctggcaacatggaaaaaccccatctgtaccgaaaaatacaagaaaaaaaagtgttagsattatatggctcatgcctataatcctaacactttgggaggctgaagcaggtggatcacttgaggccaggagtttgggaccagcctgggctacatagcaagactctctctctaaaagaaagaagaaaaaaaaattaaccaggtgtggtggtgcatgtctgtaatccctcctactttggaagatggggcaagaggatcactgagctcaggagttggaggctgcagtgagctacaataataccactgcactccagcatgggcaacagagtgagatccagcctcttaaaaaaaaaaaatccattctgagcatactgtcctctggttttcatagtgtcctgggagagagctcttatcacttagcacattctgtagagatgtccatttctccaagcacrataagatcagggatgaggggctgtcccttaagctgggcacagccatcacctggcttccaagaaggatagtggtacacagagagccagggcctaggagggagaggactggacttgaactcaccattcactagatttattgttcttaagcaagttactgaatttctctgcatgacagttttcttatttgtaaaatgggttaatatgaactgcctcatggggttattattattattttttgagatagggtctcactcagtcacccaggctagagtacagcagcatgatcacacctcactgcagccttgacctcccctggctcaggggatcctcccacctcaaccccctgagtagctgggactacaagtgagagccaccacacccagctaatttttgtattttttgtagagagaggattttgctatgttgcccagcctggtcttgaactcctgggctcaagaaatccacaggctgggccagaygcagtggctcatggctgtaatcccagcactttgggaggccgaggcgggcggatcacaaggtcaggagattgagaccatcctggctaacatggtgaaaccccgtctctactaaaaatacaaaaaaaaatagcctggtgtggtggtgggcgcctgtagtcccagctactcgggaggctgaggcaggagaatggcgtgaacctgggaggcagaggttgcagtgagccgagatagcgccactgcactccagccttggtgacagagcgagactctgtctcaaaaaaaaaaaagaaaaagaaaagaaatccacgggcttcagcctcccagagtgttgagattacaggcatgagccaccatgcctggccagttattataaatattaaatggaacaaaatccataaagtgcctagtggagtaggtgtgccattrtgggagagttaaggctacttattattgtgccagacacacagtgggcaatagtcaataaatgactattgaacaaacaatgttgattgtgcatgattcagaatgtgacaaaatggtttctacgaacagaaccaacactgcaagacacatgtatttgggtggcatctagatggagattggaccagagcccagggccagcgagcacttctcatggcccagcccagggcactgctggacatccagtggctcctcaagcrattcacggctcctcctaaagactgtacctggagccagagtccccgtctcagcagctgctctctggctctttttgttagggccgtgtgctgggcctcagcagaggcgttagggggtctcactcagctgttggtggcactgagtgacagcatttccyccctgggagcygcagccctgctgtgaggttggctcagggctgacctccctgtgaagagtctctttttgcagatgatggatgccaaccagcgctgggatgtgcctgaggcggtggagtggatgtccaagctsgccaagttcaagccattgtggattgaggagccaacctcccctgatgacattctggggcacgccaccatttccaaggtaggaaaacggctgctgctgctgtggcagcttatttttctgtttagttttccagagtgctggggacagatcctaaaatttcttcacttgttccctcttgcatttcctgttgaagtagctgaaataattstaatgtgtgacaaatacagggsttacagacctgacattcctttttctacttcagcttatactttgcccttatttctgtttgttttagataaagtaagctgctaaaagttgaagggctaccagcaatttgaaggttaatagacatggttcctatgctttgtaaatacagaaatgtgacagcatttttttttttgttttttggggggtttttttggtttggtttggttttggtttggaaatagagtcttactctgttgcccaggctggagtgcaatggcatgatctcggctcactgcaacctctgcctcccgagttcaagcaattcttctgcctcagcctcctgagtagctgggactacagatgtgtgccaccatgcctggctttttttttttttttttttttggtatttttagtagagatgaggtttcaccacattggccaggcctgtctcgaactcctgacctcagaccatctgcccgccttggcctcccaaagtgctggattacaggagtgagccaccgcgcccggccttgtgttttcatctgataattttttttctcctacacgctaactggtttggcacagtcatgtgccccataacaatgtttcagtcagtgaaagactgcctatataatggcgcagtatatataatcccataagcttataatggagctgaaaaactcattgcccagtgacgttgtagagattgtaatgtggtrcaacgcattacctttcctatgtttaagtatgtttagatactggccattgtgttccaattgcctgcagcgttcagaacagtagcatgctgtacaggtttgtagcctgggagcaataggccatgccatatagcctagggcgtgtagtagtctctaccatctagggtcatggacgtacactctatgatgttcacacaatgatgaaacagcccaacggcacatttctcagagggtaaccttgtcattcagtgacacgactgtacattcatgtggcttatagccacatcctgcctgcctaggaacattttttcctgaggtgactttgcatagctatacactccccattttgtgttgatcttacacctttaactctgatggagcagtcttggttccagttctaggagggacaccttgatgcatcccacataaattcatgggtygtactggaggtgtggagtcggggactcagggaccagttctctgtttctctcagcaaatcagcacatgatctacattatgtgggatactctgccaaagcctgggtttcagaaatgccctccccttccacattgcagcctcgctggagagaacagccgagatatgtgaaacaaagaccggaggatactgggccagggcactgaatgccaagcacagtagaaaagttcattgaggagaacrttgggtgtgggctgggacgagggagatggccagagctgactccataaggaaagctaagcctcaggtgagggaagggtgagcaggagccatggagcgaccacagccttcattatttaaacagagcccaaattttctgaggaatcattccacaataggaatctcaggtgaggagccccggggaaacaagacttttcaccttgggtcccacttgctttttcctccttagggctctttcaggttggctgtgccctgctgaatgccagctggcctagcaccaacctgatctctgcctacctgagcatctcacaggaagctcctcagggctctaaccctcccaggttttgcttacatgagggaggccatccccttaggagtatctgaggaaggagcagctgcagagcctgcaggtccaggcgggggcagtggagatgccccagggagcacagggcacatgccagggacaggctgccacgtggggctggattatggggtctgtccactcagaggatgcagccagtcagagtgagccacygcagcttctccgatgaaagaacggcatagtggccaggcatagtggctcacacctgtaaccccagcactttgggaggccgaggtgggtggatcacctgaggtcaggagtttgagaccagcctggccaacatggtgaaacctcgtctctactaaaaatacaaaaattagctggtctcgatcttctgacctcgtgatccgcccacctatrgtcccagctactcggagaggctgaggcaggagaatggcgtgaacccaggaggaggagcttgcagtgagccaaaatcgcaccactgcactccagcctgggtgacagagcgagactccatctcagaaaaaaaaaaaaaattagcagggygcggtgatgtgtgcctgtaatcccagctactcaggaggctgaggcaggagaatggcttgagcctgggaagtggaggttacggtaagccaagtttgcgccattgcactccagcctgggcgacagagcaatactccwtctcaaaaaaaaaaaaaaaaaaaaacacaacagcatagtgacagctgaagcacagataatgtgactggtggctacatgtagagtccattgagacagagggtgtgtgggaggtgaggaatgggcagggagaaacccaggcagggatgggagcgaggaggcttttccaggaatctgagagagakaaagggagagggcagcttgaatagagcagattcaggaaatattgaaaaggaggaaaaacatttggcccctagtctgccatatatgcttaaaatggtagaacaaataagtcaaatggcctttcctcctcccccttcctccrtttctccctttctcttctctttggagataaataaccaagagtacttaaattagaaattttaagaagcataaaatgttggcttgaaaaggtgccttagagaccatctgctcaaactaaggccttctgcagatgaggaggccgaggctttgggtggcacaggcggggcttgcccaaggccacacatcccgtgagatgcggggccagcaccggaatcagggatacttggctgctgagtgaagggatttttctgctgagaagttggcttagtctgattattcagatgcctcctctggctctggaatcagtggagttccaacccagtctctaccactttctagctttgtgatccaggaacagttcaaacccggcacacagttttatcattttttataaaatggggataacgctggctcctctcccattggattgagaccaggaatcatttaagtcagtgttttgcacagcacctgacaggtactcagagctccaaaaatgttagctgtcagtgtgattactattaccctaagcaaagggaagggaagccagggaggaaccaaggctacctgtgcggagtagctgtggagtcgcagtcacagtagaggatggatgggagcgcccagagtccaggtggcaggtgacggaggtagtgttcaggggccaggtgagaggacagagagcagcagggctgtgttcaggtgcagagtccagtacctcaccagstgaggactctaccaggtgagcartggtctcagcctaacctgcagattgaggtctgaggccacccactgagctggaaggaagaggattttttttttttcatggatttttcctgccttaaggaaraggattttggaatcaacaaagacatgaggccaggtgcagtggctcacacctgtaatcccaacactttgggaggccgaggcgggaggatcatctgaggtcaggagtttgagaccagcctggccaacatggcaaaacccygactctattaaaaatacaaaaattagccagcatggtggcgtgcacctctaatcccagctactcrggaggctgaggcacgagaatcgcttcagcctggggggtggaggttgcggtgagctaagatcatgccactgcactccagcttgggtgacagagcaagactcggtctcaaaaaaaaaaaaaaaaaaagatatgagagggttctagaaggaggtttctcagggaggcaagaagaagggaattgatggagtgatgacccacaggaaggagtcgtccaaaggttggaccctgtgagtccacaatgagccactccgaatagccctgtccttatgccactgcgcaggctggagagggaggtgctgtccacgttgggaggagcgcagctggagcatgggccgggacaccgcagaaggagatctgcagagccctggtcaggaacggggctggtggyggcagctcagcagtgctcaccttctcctctgcagatacacagagccctcccgcacgcatgtgttcccctggacatcctttgccagtcttgagccttcacrtggcttaacagcagggccgtttcctccttcagctataaatgtttttaaacattaggagttgcagttcaaaacttaggaaaataacaccaggctgccttctattttataggcactggtcccattaggaattggcattgccacaggagaacaggtgagtgacgcccccaacaggtggatgacgtccccttggggtcagtacacgctgaccagtgaccgaggacacagttgtgtgttaggctccatcacctgctgtactttgagttgggaaattttcatcatcttagaaactgggtcattttatcagagtctagagtcagatatagaaaaagtttgtggctatttctccaatttatatgactaaggtcrggtatctttytcaaagtgtctaattgaaattgaaaaggcagcaatttaaagttgctattgcaagggcagaaaatggtcttaagaaagccagctttcaaattgaataaacatgactgcgttcactttttgagcttataaatgaagcccgagtgcctgccaaaacctgctgcagtcagcccacgagcagagcagcgtgaggagctgattctcagttttcccggcaaaaggagcaatactgctctgccgtggttccgtgttgtcatctgtgccacctgctcatcactgtcaccgtatttcatcctgatgcttcatctcccacttatcagtcgctgtgacagtcattccctcataaatggcgagccagtgtgattttgacctgactcacactgttgcattagcagatttgtaaagaagtgagcacaaggtccctgcccacgctataaaagctcgcctcatgcccagcgagaacaaagaagaaatacagtctgggcttcctgacggccactgatgaataattattggcatagagtggctgcgttgccaggtttasagatcctgaaggccaaggctgactcttctgttggtgttattttcaattctatttccagtgccacaatagagtgatatttaagcaactcctacaggcgaaggccctgcagttcctccagattgacagttgcagactgggcagtgtcaatgagaacctctcagtattgctgatggccaaaaagtttgaaagtaagcgtgctgcagcggctgcagaccagaccttcatttccccactaatcagacacctcccttgatggtttgcaattcacatgcatgggagtctgtagtttgccatttcgatttttttctamctctcatttagctttaatccgggaatttttgatgattttcatcttggaatttccttcctaaatattaataaatgatttaatcacctgtgggcaataagaaaaaccagaaagttccctttcaccccttcctctccctgccctactcttggtattaaatagaaacgatttccttttagttcctgtttgcccccatgctggtggagttggcctctgtgaactggtgcagcacctgattatatttgactacatatcagtttctgcaagccttgaaaataggtcagtaatgtggcattaatactttctgtttcagtagggtccytcaatccaggccagagcttgtaaattctgccttcatgaccagaacacactaagaccttgtcygctggcatgtcctataactctcaggyggagttggttttgctttcacagagacccaccaatgaacggtcattttgcctcctaagatagggtctggtagctgactcactttattttttaagtacattgaaggtaaggcttgcagccacactactcccttaaccagctcctgttttcatcacgtgtattctgtacttctgtcccatctcctcttcccagtactggagtcttccatggtctagacacacatttatttcatcttatttctcagaacgccccaggtgggcttttaaattaggacaatctccttccagtcatctgcacacgtagggttttgcttattccacttttcttgtctcctggaattaaatgtctcacagaaagatcactgcaagtatatagcaaaggcacaaaagcattcactgggaaagggaaacaccaaattcaggactgwgagtgataaatgggacccttgagggtacataggaggcttcagtaataatggtaaccgtttttctcttcaggggggtagtgagtagacaggtgctgtcttttaatatagccgaactattttatactgtattagtctattcttgcactgctataaagaaatacctgagactgggtaatttataaagaaaagaggtttaattggcttacagttctgcaggctgcacgggaagcatagcggcttctgctcagcttctggaaacttacaatcatgatggaaggtgaagggggaacaagcacttsttatggccaagagcagraggaagagagagtgaggggggaaggtgctacacacttttaaacaacagatcttgtgataactatctcgaacagcaccaaggaacgggtgccaaaccattcatgaaggaccacttcccatgatccaatcacctcccagcaggscctgctgccaacactggggattacagttcaacatgagatttgggcagggacacaaatccaaaacaaatccaaaccatatcagcctgcctgtcacagctgttcwataacaggcgatggaagtcaggcagcagagctcggtcacttgccccaagcctcagaactacaaagtggctgacgcagaacctgaacacagattgacctgattctaaatcctctgctcttcatctaaatcatttgtatagctgaaaggaacctcatttggtgattttattttttgggtggggagtatggaatgtattttattgttctgcatctgggtttgsttccttagatgtcttggttcttggatggaggtgggtgtgtcccacctccctcagttgtggtcccatggacctgttcggattgttttccaggtacaaagtgtaccgagaaagcctcacagtgctaatgcttcctagatgcccagctgaggcagtgacaaaatggccctcccaaccctacctgccaaaaaaaccccaagcccctggcagctgctgcagccrtrtgaaaaaatacawacgcttcttgaaaaatagatcacaaaatgtggtgattttaatctattcatctgacttttgaccagaggaacccaaataattctggatatttacagagtctgaattgatcccttttaaagggcaccacaaaacctctagagggacttcgtgtgttcatgtcatcaaagtccccacctcacattgctatattttagaagaaaaggacctgaggcacagaggtttagggacttgcctagaaacgcatggtaacacagctaagccttggccaacactgtcaattgagtggtactcgctccttctgctttaagttagcaccacgtgaataatctgacttcaggcatcattgccccgatctgattccctcctcctagggtgtgtgagtatgttgaccacctgcatgagcatttcaagtatcccgtgatgatccagcgggcttcctacatgcctcccaaggtaagctgtggccygagggcccctgtagaagagatgctgccagccactgccacgcctgtctcgtgaactagactgtggagcaccaagctttgactcctgtttgtttgcaatatccactaacaaacggttcttcagtttgtctgtatcaaaatcctcaggcctgagggccagggcttggaggttcaattgcctctgacaaggcttctgtaatactagcctttcctcactagtggagatcttaacatttgcactccttgtgcaaaaaaacctggcaccatctagcaagttagtgacctaaaaagtttggactacaattgtgtggctggggccatttattctgatcatgttcaagagatcatggctcattttcaccaacagaggtcaaactattatcaaagagtttgatgagttaactaactctggcaagtagccagtaaaatatgttcctctgccctattatttccaacagtctccaaacttattttaaaaatattaattcagggctgggcatggtggcttacgcctgtaatcccaacactttgggaggctgaggcaggtggatcatttgaggtcaggtgtttgagaccagcctggccaacatggtgaaaccctgtctctacaaaaaatacaaaaaattagccgggcatggtggcaggtgcctgtgatcccagctacatgggaggctgaggcaggagaatcacttgaacctgggaggtggaggttgcagtgagccaagattgcgccactgcactgcagcctgggcaacggacagtgactccatgtcaaaaaaaaaaaaattaattaattgcctctggcttagacgtaaaagcatttcttggagcagcataaatgcataaaatctgtttttgttccaggtggttgttaacaggactcatttttttggtctttgataggatcccggctactcaacagaaatgaaggaggaatctgtaaagaaacaccagtmtccagatggtgaagtttggaagaaactccttccygctcaagaaaattaagtgctcagccccaacaacttttttctttctgaagtgaaagggcttaaaatttcttggaaatagttttacaaaaatggatttaaaaaatcctaccgatcaagatgagttcagctagaagtcataccaccctcaggaatcagctaagtaattattacttgattcttttagcaaatcaatgcacgttatcctacttaatccttaaataagtttagatttaactaacccaaagtccaggaggatgttcttacaaaaatagctatatcaagggctggcacctagacattaaactgtamtttgaaaataagcaacrtgttgcataacttgttggaataattccttgttctgtttaacacttgtcataaattagcagaataaaaatagtcgtgcaacaccgggggtatctggtatgcaacgaagggaaaaatatttcactgattaaccccgaagtggttttgcatcttttccttgcttaatctaagcatattattagagaagtcacaccatgctgaagctaatgagggcaaaatggtagtccatagattattttaaaataacccyttaaggttataaaagtttaaaaaaaaaaaaaaaaaactctatcctaaatggtcattatattttgaggataagatgcagttaaaatgagaaaaatagggcaaaatatattcactattatttctaaaatatactcttttaagtagcatccaaaccagaatacagcacatgtttacttaaggagagttctttaatctattttaggaaggaactgagcagataagtggcagtacagaatgaacaaagcgtggacgaatgcagaacacttctttattatagcaacatataaaacaactataactttaaagttcataaccacactctacatcatgatcgatggtgttactcagctccctcagatttgagggaatagcttgtgaaattcttaaaatattctaaaaatattccaaaaatagcttgtgaaattcaccaaccttctttataagtacgtgggattgaaatgcacatacatgtttttgctaagagcacatacatttcattctcctcactttgttcataacctcagcattgtcagataccctcagtgagttaactcaaagccttttattatggaaagaactggcacagttacatttgccagtggcaacatccttaaaaattaataactgataggtcacggacagatttttgacctagttccttyttcttttagagcaaaaagaacttttacctcggcatccagcccaacccctaaagactgacaatatccttcragctcctttgaaagcaccctaaacagccatttccattttaatagttggatgcggattgtacccttcaatctgaaagtcttcagctttgaagtcatcaattttctcaacttttcgaagaatcctgagctttgggaaaggtctgggttctcgctgaagctaaaaacaaaataaggccattaytttgccataattgtacgacctgttgtaattgctcctcatgtccrtgaaacaagtacacaggatgtgatcaacaaagttctattttacaggagtatgatcctgtcgataccttsscgtaggttatgtaacatgattggagcgcaaccagctgttctcttgcacagatcgagagtgaggggtattttgtgacattacacagcatcaggagcctggtgcctcatcaggtgtaagttcttataaccactcttggcaaatttattaaagacaggaacacagtcaatctgtaactcatagtagctctacgtttacttgaattccacaatccctaacccatctgtccctggcagaaagaaggaaagatgacatgcatggacagtgaacagaaagggatgaaagccaggattcctgggatgaacagacagtggcaattaggatgtgaagacaggtcacaacctattactatgtctaaaaaygaccagagcagagagccagagagaataagcctgaagtcacctccactcaaaagcagccaaactccctcaaaggartaacttttaaaacctggatctaacctggaaggggctaaaaagtgtctggttctgagtttttttccttaaggctcatgaagcagatgaacttacatttttattgccatttcatatcaattgttggctgctataacttagggatttcaacagacttttgaagtttggacctaaatattgtacttaatgtaaaattaacaaaaaatatttatggccagggtggtggcttatgcctgtaattccagaaytttcggargctgaggcaggtggatcacttgaagtcaggagtttgagactagcctggccaacatgatgaaaccccatctctactaataatacaaaaattagctgggtgtggtggcatgtgcctgtaatcccagctacctgggaggctgaggcagaagaattgcttgaacccgggaggtggaggttgcagtgagctgagatcgcaccacgrcacactccagcctggccgacagagaaagactccatctcaaaaaaaaaagaaaaggaaaaacatttgcacttcaattctccttcaagttaaaatgagttaaaatgccyccttttggacaatcccctggcttgaatgtggctcttccctctctggtactggtgcttagtacctcacagcacctgacawgttaagtgcccatggttgctgaggcagatgcctgccttgtcctgcccacctgcccaccacttctccctaaactgaagccccacatttggagcagtcatctttatcttggacacagcattgagcagatrcctgttccacagtcaaccttttatcaagagaaggtaccaaacccaaaagtataacatctaattcttacctgaattttcagtggctcgatgtgattcaggtaaatatgtgcatctcccaaagtgtgtataaagtcacctggctataaacccgggggagaaagcagaacagtatgttagtttcaattctttaaaacatcatttaaaaacattagaatatgcagacaccgcaaggctttttttaaaaaaataatttagtgtagcttttccatttttttgtagcaacagcatcttgttatgttgcccaggctggtattgaactccagacctcaagcaattgctcctgtctcagtctyccaaagtgctgggattacaggcatgagccaccatacccaacctcagcatagcttttgagaaratccatagaagctgtatcacaaacaacctgtatagatctgttagtgcrtataccrcagggccagaaaaccttccagaaraggaaggtttcaaagtaaaagctggttcatktcttacttacacatatcaaatttaaaagctaatcagagactaaactctgcaatttgttttcccatattaaagaactgaagagctcagtgtggtaggctggcaagtcrcccttcccgagacagcccaccttcaggcccgtgatgtgcgcaatcatgtacgtgagcagggcgtagctggcgatgttgaaaggcacaccgaggcccatgtctcccgatctctggtacagctggcaggacagctcactgttcaccacatagaactggcagagggcatggcatggaggcagcgccatcagaggaagatctgaggaaccagcagaggaagataaggagggatggtggtttgaaagaccacagctaaaggcaaagtaaaacaggagagaaacagaagccaactcatatggtggagaccaggagagagagccactgggctgcagtgatgtccataacagccyctgcagcgatggcacggagctgagggagactatccatcggtgcaaggtttctgcaggtgtccatttacggctgaagcaatgctcttccatcagagctgaagggatctgggctacctcgtggcaccarattacaaatacagcaggaataattctgtttgccacaggaaactggtgcttctggtacaccctcctatattaaaagtctctattacatggccaggcacagtggctcatgcctgaaatcccaacactgggacgccagggtgggcagatcacttgaggccaacttgagttygagactagcctggccaacatagtgaaaccccgtctctgctaaaaatacaaaaattcgcgcgcctgtggtcccagctctggggctgaggaatgggaactcrcttgaacctgggagawggaggttgccgtgagcggagatcamaccactgcactccagcctgggcaacagggtgagactgtgtctcaaaaaaaaaaaaaaaataagtctctattacagatgcaagtatttcactctaagtacttatgatatcctgatagagttttgttgttgttgttgtttttaaatattcagggtctcactctgttgcccaggmtggagtgcaatggcgtgatcatgactcactacagcctcaaattcctgggttcaaatgatcctctcgccttggcctctggagttgttggaattacaggtgtgagccaccacacctggctctacaccctggtagagttgaattttacaatataattgttaaaaatgttagtgaggtggcagcgagctggaacttcatctgcttccatttaaaatgttaacatcttacatgtagtttctaggcaatttaaarccctttttkgtgtaagaatgagtataaatacacaamttaagatcatctggttgggaggctgaggcaggcagatcatctgaggtcaggagttcaagaccagcctgaccaacatggtgaaaccccgtctctactaaaaatacaaaattagccrggcatggtggcacatgcctgtaatcccagctacttgggaggctgaggcaggagaatcactcgaacccaggaggcagaggttacagtgagccaagatcacgccgttgcattccagcctgggcaacagagcaaaactctgtctcaaaaaaaaaaaaaaaaaaaaaaaatcctctgggcccaacctcatgatctgaaggtgaaagtgcagcaaaatgtgacttgcccaacgtcacacaatcaaccatgtggctgggggaagttcccagggtcctgcctccctcaggtgcctctgcacaaaaccagattgcttccctctaagagtatggttagtataaatgaagacgacggggttctttcaacctcttggattccaagcgcacatgatgattcttctgtcgtcagggttggttttgatggtgtcaatcactctttgcagttggtcaactmcctgtcctgaataatctgtagaattgtcaaaaagagaggacaggtacatacattaatcacacatgtcatgagatggccttagaggtcatctattacagtctcttacccagggtccccccttgacccatggctacaagacatctggtgcatcctgcaaagtttgcagatctcggtgggttgagttcaaggccctgtctgactcctggctctgtcctctggagccctaacaaagtctttttcctcttctacacagtcctttgaatatttggtctgtcatggagtcacctcctcctgttccccccatagctaaccctttccaatctcaacaatcttaatttcttccagtgctcctcgcaaacttaggctctaaacccatcagcgattcttgtcacaatttcactgacaaaatctactttatccttgtctcacagagagtrttgtatcttatgtagaatatagtattccatatactttccaactaacagaggaccatggattcctttctatcacctcagcagcatgtttccaacacttccacctaaaattactttagagtttagcagctcaacacacgactgacttggaaacatcaggaaacctctgtaatgattacaccaccttrtactttgctcccatttctggtctctggattttaatccctttccttccttctgagatggaactggaagctgagaagtgatttgttaactsaagtgcagagcttcataatctcctttggttaaatttctacctattagtgtcagactatattctggttcagtagttytcaaaattttgggaggaaagtcctctcatggtcactgttccraaaaaggtaacatcaaagattttaaaaagatgaaccttggtagtgtagttctgtaacttgattgtagtggttacaagagtctacacgtgctaaaattgcaaatacacacatacacaagtgcacgtaaaactagcaaaatctgacaactytgaggaatgcaccaatgtgaawgtatacaggatgttacccmagatattatcactgggggaaactgggtagwgwgtccagggaaactttytgtgcattaaaaaaaaaaaaaaaaaaaaattcctgtgaatctgtaaaacaaaattaaaaacaaaaagggacraactttcctactaaaatccaacagctaagcattcataccactgtaaactaaraccataattttattaggccttttaagcgacaagaaataattgaatactaggcaggatttaaagcatcattaagcccggggactggcctcacatcctacggacaccctacaactgaggtgcaggcaacsacctgcagaacacttacctgcacaagtaacttggcccacgcagcagcttttttcattgtgataaagtacacataatattaaacttgccatttttgtgtgcaattcagaagcattaagcacgttcctgatgttaggcaaccatcaccatcacccatctccatcaccatcaccatcaccatcaccatcaccatcaccatcwccatcaccatcaccatctccatcaccatcaccatcaccatcwccatcaccatcaccatcaccatcaccatcaccatcaccatcaccatcaccatcaccatcaccatcaccatcaccatcaccatcwccatcaccatcaccatctccatctccatcaccatcaccatcaccatcaccatcaccatcaccatcaccatctccatctccatcaccatctcccgaactttttcgtcatccctaacaaaacctctgtgcccattaaacatgaactccccattcctccctgttccccagtccctggaaactagcattccactttctgcctttaagaacttgcctattctaggtccacacagcatttttaaacttcctgaagttgctaacatttaacagatctcatgaccgcacataaaatatagattttaggcttttattgaagaattctgacatcaccaggcccaaattcctccaggtggctggaggtgaaatgtgactgtccccttagaygagacacctgctctccaggttgctggtctctgcccagctagtaaattgcacacacaaaccccacattccaaggtggcatctgcttttcctaggsacaggtgggaggggctgggctctgtgacatccagtaagaggtgacaccaacagtgacaggaaagtggaagtccaggagtgagatgtttcattctttctccacctctgcagagctgggagtggagtgtgaccctggyactgcgcttcacagcagcgccacctacagcacgctgtggctcagcctcgaaagggagattaaagccacaacaaagcaatgggggcattttgtcccttgtcccaccgatgaacttcccattccccagcacgaacaccaaccatgcagctatctgccgatgacacagtatggaaagtgccaagcgcccagtaagtgccaatcatctgagtgacctacaaagagacttagactccacacattaataatgggagactttaacacccactgtcaacagtacacagatcaacgagacagaaagtcaacaaggatacccaggaattgaactcagctctgcaccaagcagacctaatagacatctacagaactccatcccaaatcaacagaatatacatttttttcagcaccacaccacacctattccaaaaccgaccacatagttgggaagtaaagctctcctcagcaaatgtaaaagaacagaaattataacaaactatctctcagaccacagtgcaatcaaactagaactcaggattaagaatctcactcaaaactgctcaactacatggaaactgaacaacctgctcctgaatgactactgggtacataacgaaatgaaggcagaaataaagatgttctttgaaaccaacaagaacaaagacacaacataccagaacctctgggacacattcaaagcagtgtgtagagggaaatttatagcactaaatgcccacaagagaaagcaggaaagatccaaaattgacaccctaacatcacaattaaaagaactagaaaagcaagagcaaacacattcaaaagctagcagaaggcaagaaataactaaaatcagagcagaactgaaggaaatagagacacaaaaaacccttcaaaaaattaatgaatccaggagctggttttttgaaaggatcaacaaaatttatagaccgctagcaagactaataaagaaaaagagaagaatcaaatagacgcaataaaaaatgataaaggggatatcaccaccaatcccacagaaatacaaactaccatcagagattactacaaacacctctacgcaaataaactagaaaatctagaagaaatggataaattccttgacacatacactctcccaagactaaaccaggaagaagttgaatctctgaatagaccaataacaggagctgaaattgtggcaataatcaatagcttaccaaccaaagagagtccaggaccagatggattcacagccgaattctccagaggtacaaagaggaactggtaccattccttctgaaactattccaatcaatagaaaaagagggaatcctccctaactcattttatgaagccaacatcatcctgataccaaagctgggcagagacacaccaaaaaagagaattttagaccaatatccttgatgaacattgatgcaaaaatcctcaataaaatactggcaaaccgaatccagcagcacatcaaaaagcttatccaccatgatcatgtgggcttcatccctaggatgcaaggctggttcaatatacgcaaatcaataaatgtaatccagcatataaacagatccaaagacaaaaaccacatgattatctcaatagatgcagaaaaagcctttgacaaaattcaacaacacatcatgctaaaaactctcaataaattaggtattgatggaacatatttcaaaataataagagctatctatgacaaagccacagccaatatcatagtgaatgggcaaaaactggaagcattccctttgaaaactggcacaagacagggatgccctctctcaccactcctattcaacatagtgttggaagttctggccagggcaattaggcaggagaaggaaataaagggtattcaattaggaaaagaggaagtcaaattgtccctgtttgcagacgacatgattgtatatctagaaaaccccattgtctcagcccaaaatctccttaagctgataagcaacttcagcaaagtctcaggatataaaatcaatctgcaaaaatcacaagcattcttatacaccaataacagacaaacagagagccaaatcatgagtgaacttccactcacaattgcttcaaagagaataaaatacctaggaatccaccttaaaagggatgtgaaggacctcttcaaggagaactacaaaccactgctcaatgaaataaaagaggatacaaagaaatggaagaccattccatgctcatgggtaggaagaatcaatatcgtgaaaatggccatactgcccaaggtaatttatagattcaatgccatccccatcaagctaccaatgactttcttcacagaattggaaaaaactactttaaagttcatatggaaccaaaaaagagcccacatcgccaagtcaatcctaagccaaaagaacaaagctggaggcatcacgctacctgacttcaaactatactacaaggctacagtaaccaaaacagtatggtactggtaccaaaacagacacatagatcaatggaacagaacagagccctcagaaataacgccgcatatctacaactatctgatctttgacaaacctgagaaaaacaagcaatggggaaaggattccctatgtaataaatggtgctgggaaaactggctagccatatgtaaaaagctgaaactggatcccttccttacaccttatacaaaaatcaattcaagatggattaaagacttaaacgttagacctaaaaccataaaaaccctagaagaaaacctaggcattaccattcaggacataggcatgggcaaggacttcatgcctatgccaaaagcaatggcaacaaaagccaaaattgacaaatgggatctaattaaactaaagagcttctgcacagcaaaagaaactaccatcagagtgaacaggcaacccacaaaatgggagaacatttttgcaacctactcatctgacaaagggctaatatccagaatctacaatgaactcaaacaaatttataagaaaaaaacaaccccatcaaaaagtgggcgaaggacatgaacagacacttctcaaaagaagacatttatgcagccaaaaaacacatggaaaaaatgctcaccatcactggccatcagagaaacgcaaatcaaaaccacaatgagataccatctcacaccagttagaatggcaatcattaaaaagtcaggaaacaacaggtgctggagaggatgtggagaaataggacactttgacactgttggtgggactgtaaactagttcaaccattgtggaagtcagtgtggcgattcctcggggatctagaactagaaataccatttgacccagccatcccattactgggtatatacccaaaggactattaaatcatgctgctataaagacacatgcacacgtatgtttattgtggcactattcacaataggcaaagacttggaaccaacccaaatgtccaacatgatagactggattaagaaaatgtggcacatatacaccatggaatactatgcagccataaaaaatgatgagttcatgtcctttgtagggacgtggatgaaattggaaatcatcattctcagtaaactatcgcaagaacaaaaaaccaaacaccgcatattctcactcataggtgggaattgaacaacgagaacatatggacacaggaaggggaacatcacactctggggactgttgtggggtgggaggaggggggagggatagcattgggagatatacctgatgctagatcatgagttagtgggtgcagcgcaccagcatggcacatgtatacatatgtaactaacctgcacattgtgcacatgtaccctaaaacttaaagtataataattaaaaaaaaaaaaaaaaaagagtgtgaaacggccttcatgaggcttaattgtggcttaacctggcaccacccctcacaaggtcaaagctatacatcagctcctgtgacattgactcatcccccagaccttatctaaaacaacggagcaaacacatgctaggaagggcacccgggaaatggaaggcattgttctatctcctcacctgattccatatctctgtattctgccccaaaatgcctccactggaagccataaactgggcccaagtccccttcytctctggtggagaatcccaggctgtccaaaaagtctcgggatccattggcatcccagattttcactcccttggaagacagctctttagcatttgtggatccctggaagagatggggagagcagagcaggcatccaggtaaatcctaagccatctcagttgatccccccgagacaccacttacaagggcctctggcccctgctgacttgctaggaggtgggcacttgacaccacccatatggaacccatccttttttttgttttttgagagtttcgctcttgttgcccaggctggagtgcaatggcgcgatcgtggctcacggcaccctccacctcccaggttcaagcgattcccctgcctcagcctcccgagtagctgggattacaggcatgcgccactacacccagctaattttgtatttttagtagagacagtgtttctccatgttggtcaggctggcctcgaactcctgacctcaggtgatccgcccacttcggcctcccgaagtgctgggattacaggcgtgagccaccacacccagctgcccatcctatctttaagtaggctggtcccagcccagattcctgagggctttaggacagtctgatcccttctttggaaccaccctcccagatcttttcttccattcccctcaactaagctttttaggctaaacacctccaagtgcttttaagtattccaccgatctgacagttttatgtttcttaatgaaatgtgttgtctatatgtaataccccaaaatgaatttaatgcctacatgcaatctgttcaatgtatcttctacctggcatacaggatattcctaatgatcagactaatcagtattttacagtgcaggtgcctcaactcctgtatttgatcgagtcaccaatggagtaactccaactatcaaggtgagtctgacattcctggcaaggattccttagaatcctgaattgaagcattaagttgaaacaggggaatgcattttatttctgagtatcttgcttcctccctttctattgttgagtttgtcccgattttctttgattgagaaagaatcaaagaaatttccaacaaatcaaagaaatttctccaattgagaaatttccaacaaatcatttctcaatcttttacatattgcttcaaaagtctctccttttcatccattcagaccaggctctagccagtttaagaatgttgtcttctgaggtttctgatgatatgtttcaaatccaaggttcattgttagtcaagataggccaatacagaacaaaataccccaagaatacagagctaaggcagacctggggctggatccaaattgaagccctttctaaaatgggataagagggcttgggtctggcttgccccaagaccatacaagccataccaagtgctctatagaagggatcccagcttctagtatggcccagacctgagcccagacctcagccaccttccaaaaagcactggtcagaaagaacatcgctggttctagaccaggacacggaacacagagaagcttggtctgggctgctgcctgtcttcacagcactctggccccggcctgaggtacctactcagccctctggaaggggttcaccttgttactgaagagactcttctagaatttatatgaacatgggaacacaggtggtatctacatttagtgatcaatatatgttgactcctactatgtggcaggctgtgtttgaggccctggcgatacaacagtgaacacgagaaacaaatcctctgccctcataaagcttacagcacatttcacttttactacctgctgtcccccttctaacaggggaagggaaaggctgacatacatcagatggtgatgttcgtctatggagaaacaccaaggaggttgggggagagtcacagttttaaatcaggaggtctaggaaggcttgcccgagtggagtagagactcaaaggaagaagccaagtgtgggggaagaaggttccagggagtggggatgtcccggtgtgctcaaaaactcacaagaacagcagggctggtgcagagagcagcagctaaggtcagagctgaaaaacggac

SEQ ID NO: 95730 - DNA, 68710 bp, Homo sapiens
tccattttgctaactgtcctccagtcacacaggcctcctgtcagttcccaagtaggtggacctccttcctaacatgagccatcgcacatgctgctccttcaacctggagcgctcatccttgccttcccttgccaaacccccttcccataaaatgattatacaactaattcctttacatctttatgtttttgcttaaatatcacttcctcacagaggcctttcctaacaaccctatttaaagttaaatactacccaagtattctctaccttagtctctcatttctttgactttgagtgttgctgaggctaggttacttaagcacttcgcctcggttttatcatctgtaaaatgggaataaaggatacctacctcataaggctgaaaagaagattaaatgaatagcacttagaattcaagcacacaacagtactcagtagatgctaccatttaccacatagtaaaattcttttatatttttatttatttaaaaaaccttggccagccacggtggctcacacctgtaatcccagcactttgaaaggctgaggtgggcggatcacttggggccaggagtttgagaccagcctggccaacatggcgaaaccccatctctactaaaaatacaaaaattagctgggcatggtgctgtgtgccggtagtcccagctattcaggaggctgaggcacgagaatcacttgaacccgggaggccaaggttgcagtgagccaagatcataccactgcactccagcctgggcgacagagcgagactccgtctcaaaaataaataaataaataaccctgctcccacacagaataaaggcctcattagggtagtaactcttctttgttcacagtgctaggttcacatatatttgttgagaataaacaaagaaaatattttctgaatacaaataaaaaattactacatgattagtatcttagggcagtgtggtggccatgataatgctctactcagatcttcagctgcggggaccacagttgactgacagctcaagctgctaccctctggatcaaccaccacatttgcaccaaggccatgctttctgagggtcccagtcaatgaatgaggatggcaaaggtactagtacaggcccattctgacaaactgcaggactctttgcaaagccaaccctttcttggaattgcactgtacccagaaacttcttacccaatccacattccttccttttctcctcctgtgagtgtcagacctgcactgctgtctgcaagttctccctccctgctcttgctctctccttagtaaatctcttgcacatccaatgtatggtgtaatgtatctgtgtctgcttctatgtagacccaaacgaacacaatccggatcttcagaagcaaatcctgaggtgataattcataagcaaatgatttgttaagataatactctcagggagagagaaaaacaggacaggaaaggggaacaagccaaacaatggtagaatttcaggcaaatcccttgactaaccctgcagggaagcttggcatgcccgggcaaaaactgacccactattccatctctcaccttgaattatgctcattatgtggtccaactgagcccaccaaacaggattttacaatatatgctagataatgatatatacagtacctgcaatataataaaatagtgctacatatatatttcaataatattatacctttgcctggcagatagtaagcactcaatatattgaacaaacagtacaatatcaacaatataaaatgcttgaaaattgccactatgctataaaaatacagcctccctacatagctttcatgaaaattactctttttccaagaaaatttaagctctagagtataaagggccgtccttttccttttttttttgagatagagtcacactctgtcacccaggctagagtgcagtagcacgatctctgctcactgaaacctccacctcccacgttccagcgcttctcctgcctcagccttctgggtagctaggattacaggcgcggccaacacacccagctaattttttgtatttttagtagagatagggttacaccatcttggtcaggctggtctcaaactcctggcctcaagtgatccacccaccttggcctcccaaagtgctgggattacaggtgtgactcactgtgcccggccatttttttcatttttattcttctcagttccattcctctcacaatgcaggagtctcattctttttattcaactttgccactcaaacatcagttccctttaaataaatataattatttcaatccacttaaactacaaatgagagaaagggagagatggctggggcccaaatgctgaaaaaggcaaacctgcaatccaacatcctaatgtggccgaccagtaagcatggagcaaaaagcttccttctgcctagacaatagtcaggataagaactagaagaaaagcagattaaactgcatccttagtcctttcctcccagatcttaccattccaatggtaaactgaactcaagtaaggccacactaaggaaaaaaaagaggaatgaagatgtgaatgcctagaactgatctaaaccatccatcctagattctcccatgcaagttatttcctaacagagaggcagtccttcgtccatcttacttcaccagctagcatgaggaaaaacaggtgctcagtaaatataagtgaaaaggttacatgttcctggatgtctgccctctggatgttattacccacttaaaaacaaacaaacaaacaaacaaaaaacaaaaaacaaaaaactctttttttttttttttttttttgagatggagttttgctcttgttgcccaggctggagtgcaatggcaggatcttggctcgctgaaacctccgcctcccgggttcaagcgattctcctgactcagcctcccgagtagctgggattacaggtgcctgccaccatgcctggctgatttttgtatttttagtagagatggggtttcaccatattggccaggctggtctcaaactcccgacctcaggtgatccagctggctcggcctcccaaagtagtgggattacaggcgtgagccaccgcaccgggcctatgttttgttattaatgacactatggtcctcgcccttatccaattgtaaggaaataatttctgaaacattgaataggcccatggtaaagattcaagagttaagacttaagaaaaatacaggctttgggatgacagctaggctcaaattccaaacttagctttctctagccatgtgacttacagccaatgaggctgtatactcattaatatataactaagtaaaaaattgttgtaaggactagaagcaatataagaaaagtgccaggtcaggcacagtggctcatgcctgtaatcccagcactttgggaggccgaggcaggaccacttgagcccaggaattcaagaccagcctaggcaacatagcaaaaccctgtcttacaaaaataaaaaaattagctgagcttggtggcacatgcctctagtcccagctacttgggaaatggaggcaggaggatcatttgagcccaggagtttgaggatacagtcagctatgatcaaaccactacactccagtctggatgacagaatgagaccctgtctcttaagaaaagaaaaaaatgtacttgcctctgaggtcttagttgtgttccagatggttaatagtcatctgtaatatgataatcctattacaacaattagtatcagataaacaaagtataattctgaattaaatcatttttattttgccaatttgtaaatttaatgtatacaaccaaacctgaatgatcttgctgattcttaaaaagcctgtaacatttcaggtagtcattattgttcacaattcccacttaggagtaagattctgcagttatcttttccttagcttcctgtattcttattgtgcatgttaactaaaaaatcataagatctatagatttagaaaaggagagactttgtttcttataaggagttacagcctgcaaggtggccattctgcaggctgggaagcatgcctccagccaagaccacatacagacacttcagaggaggagttggagtaggaactttatgcttaactggttggctaaacatacatattcaacaagttagaggagcggctatgaatattcatgaaagtggtcttgacacatgcatattaaacaaatatgcatgtttaacagacaatccatgttcactttggggtggagacttaacatttaaatgtatttacagtttggtcctatacatcaaaatatcttttcaggaagttacgtaagcatgcaatcactataaattggccagaacaagtccatggtcagtgaccttcttatcaggagaaagtaactgaaatcaataaaagctgtagttacggctggtgggagagggttgttagtgtctggtggtcgatgaactgcaaattgttttaatactgtgaggccagcgcttgtttagctgctaaagaaaaaccttgaagcatagtgagaacatagtttatttttcaagcgtagggatgcatgacttttaacccttgcttggcatgggcttaggtcctgtttatactttggtatcttattgccatggagtcaattccgtcagtcctatcatctccgtttttttttttgaaacagagtttcactcttgtcgcccaggctggagtgcaatggcacgatctccgctcactgcaacctccgcctgccgggttcaaaccattctcctgcctcggcctcctgagtagctgggattacaggtgcgtgccaccacgcccggctaatttttgtatttttagtagagacagcgtttcaccatgtttgccatacctcaggtgatccactcctgacctcaggtgacccacctgcttcggcgtcccaaagtgctgggattacaggcgtaagccaccgcgcctggcctctattttaactttatggccagtcagctatctcctctaaatcacaaaagggagagggtataaccaggtccgtctgacctcccatcccgttatgactgggaactcagttgttaagattttgctggtgtccccttggcctcacgggggtctgttcagttgttggggggcttaggattttaaatttacagacttcgaagaagggaacaagatacacgtgtgagggaataagaggaagttacccgagtctgagtcagtgcttccttctccaccgtgtaactccaacttagagttactgccactcggcttctatcggccacgtctctcctgggaaggcaggcaagggacgaaatggagggagacaaggttttcgctagggaagcctcggcccaggacgcagcgccacccgttttccaatcagcgccgggcactgcattcctcctaggtctctttctttcagtagagaccttttaataataaatactacttacattgctttacagttcacacttgcggtcattatttcagtggagcttttcaacagctctgtgagacaggtattatttctatttcggagcagagagaacagcgcccttgagccacagggctcatacatccggagcctatcaccactccgcatcttaagctcccgggatgaccgcggactggcggcccaggaccactgctccagctgtttccccaggtaatccacctgccttgggttaccttttagcgcggcccagttagccgcaaccagccaccatttacccgctttccccaaaccaggaaaaccacagaaacgcatgtgcgcggccagtctcttccacgcccgggaacgcagagcttacagaccaaggccgcccaagtcccctcaccccaaaggctacccaagaaccccgagtaggctgtttggctgactcaggcgcccaacgcccacccgaactgagtcgctagggaaactcccaactgccagctcgcccgaccggtgttcacaggccactctagccgggctcagagagaccgcagtctcgttgctcctggcttgacgtcatcggcaggcgccgcagcgcagtggcgggcacgcgcagccgagaagatgtctccgacgccgccgctcttcagtttgcccgaagcgcggacgcggtttacggtgagctgtagaggggagggtgcaggcctgacccggcgctatgctttgtcctcttctccctgaaattactcgaattttgccctggggtaaagtgagacagaggtgtgtccgcctcagcgtccgctccgggccccgtcggaggttgaggggtagggaaagacgcactacccgcctcttctttgtgggctgggccgtccrcctccgcccaccctccagcgggtccccggactgcgtgctgggcgcctcggctccccgcttggagtgcccacctgcagactactgctggttgggtccatcctctcagctcgtttagtggggcaggtgtctcgagaaggggaaggggagctgctgaagggggagggtgggagtggtttcagtccaaagacctggctcccgccctagccttctgagctaccaagtgcttgttcccgccgtctcttcaccaccccttaacccaccgtgtctaactsctaagcgatcgatgagatcctaagcgggaaaaggcagatagatcaccttgggaagggtaaccagatgctattttattcttgctcaatgtggaagggtggttttgagcatttgggaaacacttgacagakcactttctcatttaactattagagtaacactgtgaagtaggctaagttggttattcctggtacatgaggtagaagctgacaccccccaaaaagttgtgacttcastggtttttctgactttagacactctgttctttttatgttgctcgtcacagcaacgtaagtatgaagaacacttttaagttgcctgactctattcgtctctagcatttgcaccaacatttctcagatattcggctgtgttttggtagttatagggatgccaggatgaaaattgtgtgaaagaaaaattcatcctttgtagtaagtagttttcttgtttgcagggttatatatatatatatacatatatatacgtatacgtataatatatatatacacacacacacagtgtgaggttttttttaaatggattatattttgtgtatgtcatcataatcattttctttgtgtgcgttttgctgcaatctctggtgctttgaaagcctgctaagagtaactgttaggactatccaaratcatattggcggccgggcgcagtggctcacgcctgtaaatgcagtacttcgggaggccgaggcgggcggatcacctgaggtcaagagttcaaggccagcctggccaacatggcaaagccccgtctctactaaaaatacgaaaattagccaggcgtggtggtgggcgctgtaatcccatctacttgggaggctgaggcaggagaatcgcttgaacccggacagcggaggttgcagtgagccaagatcatgccagtgcacaacacctgggcaacagagggagactccatctcaaaaaaaaaaaaaaaaaatcatactagccctgaaaaggaccatgaaattggagatcatctagttcagtgtttctcaagcttcttgtgaaatgcagattctkgttcagtaagtgtggaagggagcctgagattttgcatttctaccagcttcctaggtgatgccactgtagctgctgctggtagtaaaaatctacaaaaaccctcttatttaactggtgacgaaaatgaagcacaaagagataaaggaacaggccccaaattactcagcctgttagtggcagagcaaggaatggacacatttaggatagatctaattcctgtgaggtaataagatgactttctaagtgtatgtgagtgttcatagaatgaatgccttttgcaatatttttgtctttaagttatgattactttaaaacaatctacagattgtcagcatggttttattgagtgctacgtgtcagggactgaacaagatacctccaggaggcgagacctgacatgggtgtgggagaatggatagaatttggatgagcaggtaggaagagcaacatgaatgtgtgaatacagtagaatgagtttgatataaagtgatgaaaaatggctagactttagtgcaaagtatgtgttagggagtattgggaattaagtttgggtaaattgggataacattatcaaggaccttgagggatctatgaagcttcaaaactaaaacgggcaaataaggagccatatggagattttttttttttgtaagcacaatactcatgaatgtgatatttaaagagacagaaatatcacctagaatgaaaaagtccagcaaggaagctcttgccagatttaaagtgatgaggatccgtatcatgaagtagcattggaataaggattactgagagaatgactgataggtaatttttcccaggtataagcattttttagttagtaagatacactatcaatgaacgatatatttttcagcaaataataagcaaaatctttacaattatttgccattttaatttttttttagaagtctaccagagaggccttgaacaacaaaaacatcaagccattgttaagtaccttcagccaggtacctggcaggtaaggcattgatatctatgaaaaatacttgcctcaatctttatacataccctgagctgtttgaaaaatgaggatgtcttttgtttttaatagtgaaaatgaaaaaaaatgtacccttgaccaagctttcagaggtattctagaagaagaaattgtaagtatgtttttccattgttaaaattttactgacaaattaataaaccatgttatttaaaaattgctttttttcttagaatggatatttaaacatctttttttagagtaacctttctgctttgtaaaagttgacttgatgactatacgatttctctaaggattttgatagcacaggtacattttaagggtttggtttaataaatgacaagagccctctccaagtgagataagaaaagttgacatgaggtcttaggaagaactagaggtgaaggtgggctctctcactttcctgtataagcagtgatacatcctgtagtggcgcaaaaggtctagtccaagaatatttagcttaggagctgggattccattccctcattttcctctggcatcctcctcatcagtaaacttacataaataactgagggctctccaacttcggtagagaagtctaaccatgaaaaatctgaatttgtttaccaataatggggcacctgaatgaaaggaaaagtttcaacagtttattcttggtcaagcaaaggttgggtccccaaaagctagattcccttctattggccatagtacaatgtccctttctctcagacaagtctgattaaaaaatgattctttccttttcttcagacttagtcacttttccattgtgaggcattgggcaagttcttttccttttctgtgcttcagtttcttttgtgagaggggaaataccgttctttcagtgttgttgtgtgtaaaacagcacttaatgaacactcagtaaatgctggttattatgattttatagaacctaagcactgtcttccttctattaaaaccacccctcagacacatgggtgtattagtagttaattctcmtagccctgcctttgccctgtgccactggctgagttatggcttcagcacttctgtccttgattagcttatagccttcatcttgctaatataaccattttcttgagaccattggattttgagtgagttgcctgttacttgacatacttctacgactattgattctatatgttactgttaaattttggtaacttcatattagaaaatattgttttctataagaaatattgtattccatatttctgatagtcaatttaatatcagagtacatgtttttactgttaatcgagtttagtctgaactcttgcccctaaattaaattgtttctcctctgttggtagataaatcattcatcatgtgaaaacgttttagctattatttctcttgctattgggggagtaactgaaggtaagtatggttcygttttgttttgtttaaagtaatcttggacatgacatgctttatttaaaacgtcttctccccatacttctccacctatctgattttgtttattcttcaagttctgcctgactcccaactttgccaagaagtcccagttgaattagttcactcttatttctcatctctattatgcagtgcacattttggcacttcctttgttctccagttgttttgttcattcagtaaattttcattgagcatctactatgtgcctggtactgagctaggacctggagattcaatggtgaataaarcatattcccctgcttatgtggagctaatggaagaaacagatgtatgcatgccttactatggtgtaagtactatggtcgaagtgggaatgaagtgtagttagagggaatagagccaacatggctctctaaacttcagtctaaaggagtcaggagaggttttagaaaagaacatgagaactagaatgtgaggtatgaagaatttgttagacatactaagaaaggaatagctagagaattgtgtacagcaggaggaggagaggacaatgagaatgatgaggaaagaagcaggttaggtccatttataaagggcactgggtgccatactaaagagcagctgcaggccgggcgcggtggctcacgcctgtaatcccagcactttgggaggctgagacgggcggatcatgaggtcaggagatcgagaccatcctggctaacacgatgaaaccccgtctctactaaaaataaaaaaattagccgggcgcggtgtcgggcgcctgtagtcccagctactcaggaggccgaggcaggagaatggtgtgaacccgggaggcggagcttgcagtgagctgagctcgagccactgcactccagcctgggcaacagagcaagactccatctcaaaaaaaaagagcagctgcagatgaatgattccatttgaagtgactgctggcaggaaaactgggcaggagcctgttaaaatggctgtgtgtgatagctttagaagacttcgggtaaacaatgcacatagtacacagagcctaacacaaaataggagctcgttaaatatatgcagaaagaagaaataaaaaattagtttatcagcattcttctttaaccaatttggttaaaatactcatttgattaattcaaataatatatgtgaaaactcctttttaatctgtaaagcattattcacattatgtgttattttgatgcttctataaaaactggcacacacctcccagtataggggcaaactattttatgaacttaagttcataaattcactttgttaaatgtttatacaagctgcctaatcattcattcattaggcatagttagctgagtcccacaatgtaatattccttgtctagtttcagtcaaacagtgttcagtgtgtcctgagttcattgattacctttatacattattcttgcacagctggtgatgtttttaatgaagaagttgtacaaagtctagtctatacttggaacttttgagaaggataaggacttaagagcttaaactgtaaaggcatagtgcatttttattttagggataatttttctttttgagacagactataattggttatgtgacatgtttttaaattatccataaatatattttgttaaattcaatttggccgatatttattgagcttctattcagtgtgagatgctactggttaaagcatacaaaaatgcctaaccttaaaaagctcatagtctacattcaaaggtgactagttaggatgtgctaaatgctacagtatatttatgtagagtgtgcttcaaaagcatagatgaagtagcctgcttcaggatatcagagttatttagatgagctgacattcactctatgcttagaaagatggagttgaaatttaccatgtggtaaagaggaggaagagtatgcagaaaacaacattgtgaacaaaaccatggaaggatgaacatggcatggtgtttgggaactggggagtgggaactagaaagggatgtctgtggcccaggtaagggtaaggagagagattggtgtggaagctgggacacaggttgtgaaagctcttgggggaatcacactataacccaatggttcccagacttgctggctcatcagaaccaccagtgaatctatttttagatgagattcccaaaccttgcttagttctactgactcagaattttggcagtagaatctagaaaaagttctataattattaaatgtgagttaacttattccaggctatactgcaactaagggcagaaaatatgcttctcaaatctcttggatgtgcagggtatataatatcattgaatctaagtattgttagggactttagaggtcacctagtccagtctcatctctggcctagactgcttctctgctgtaacatccctggtgggtggtcattcagcctctgctgaatcatgctcattagtggagctcactgtttgagtcctgttagacaaatgtggttattggtgtgttcccttgtattgagttgaaatctgctgttttatttcacccactgcttctaggcaatatccctcacgtcgcattccagatatgatcttactagtgcagagtacagctggaaatatttcttccttttttctggacatagtatattaatgcactgttttgggcttagatcaccctagatatttttcctccatataccatgcctaagtgactacttttcttaaacacttatgagtgttagtaagtactcattgccttaaaatagaaggaagaatgagtagggatataaaagtattctaagtagtctagatagactacgtagaccttttcttaagaaaaatcttaattttgttgttctttaaacagtaactttctacttttccattctttcccctgaaacaatactgttattttaaatgttgaatcatagttaatatcaaaccttgttattttttgaagataatcttttcaaatcacaaagacaatttagcaacattacaaaacatttagaaataagaagggaaaacagtactcttaattcctctacttttaaaagctaccattcatctggtataatggttttagtttctatagtcttttaagaattttttttattgtcataaccatatgtacatacaattttgaatcctgccttttttcacttagcattatatcataagcatttttccaagttattatagtcgttataaccatcatttttaattggctgcattatattcttttgaatagcttagtggtgaagaaaacagactgtggagccagactgcctgggttcgtatcccagctctaccacttactggctctatgatcttggtgaagttatttaacctctctgtgtctcagttttcccattctataaaatgcaaataatgatatgctctacctcataggrttgtaaggattaaatgtgttagtatatgtaaagtacttagtgtgcctgacatatagtaaatgctctagatcttgtcaagaattattgtcatcrttactgagtgcacatatcaaaaattacttaagtatgtcctatttggggacttttaggttgcttccacttcttgtccttttaaaaccttgttatgagtaacmaagtgtaccttttaagatattcttcagaattatttttcataggctattctactctacagttttttaaacttttaaattggcttgtgctccacttgaaggtatttgtaccgcatctacaccttttgtattgttgggagatgttttggattgtcttcctttggatcagtgtgacacaatattcacttttgtggaaaaaaatgttgctacttggaaatcagtaagtgccttagtttcttttcctgctaactttatctttctatagatccagaattctgagggtagattttttttttaaatttatttgtagtattgctgaatgccaacaagtttctgcctatgaaaaaattatatactgctctctcgggagagccaaataaaaaccatgtgtggagaaaaacttgaaatacaaaatttgatttaatttgtgtaataaaaattaacttgaaaattcacactttcacatgtttaaaacagttacttagtatcatgttttcttatatctgaaaatatttttatttcattgaaaatgttatttgcttaaaaaaagtgaaagtggcatagtagattctcagtgcatgttagtgttctttaatatttcacttctggcaacttattattgaagaatgtgtaacaagttctgaagaagagtgataatttccgtcttaatttcagaatacattctattctgctgggaaaaattacttactacgtatgtgcaatggtaagtaattgagtgataaaatgattgctttttaagtgtaaatatgcccagaaaaacacatggttgaattaaataccagtgataacattttaaagatagattaggtatctgcatttttaactaacaatctgatttgttagaactcattattcactttaaactgtttttgttctgggcataagcttaaagtcagaaacgtagtaaagtttgtctttttcatgtcatgttgaacttgttttgttcctaatttatagtacttttttgtggcagtggtttcggcccccaatttaagaactactgctttaggaaaatactcttgacacactggtttagaaacttttaggtgtggttgtaataaacatagaattatcttttctgtgtaacgttcattttcatatattgttagatctcctaagaagattgtctaaatcccagaatacagtcttctgtggacggattcagctctttttggccaggcttttccctctgtctgagaaatcaggtaagcttttatgcattaaatgagttttctgyaggaaaatcttttccagtttttaatagattaaaatctgtcatgataatgagaaaaatggttctaaaaagttgaaagacatcatagaaattgtcactttattttcttttacttataaatgtatagcagtcctagtatataatacaggtaatcctgaaacaaagtcatggattcttttaagttcaaagcttattaatgtaaagttgaatcacactgaaacatgtagatatgaaccatcatatccgtatttcataatgtatgcctatttttgtgtttggattttctctcagtcacaactatttagctatatagacttcctttcatttctctttttttaacaratttttattgtgaaatataacgctcatatagaaaagtacataaagcgaataataatgaaacaaatactgtataaccactatctagctcctgaaatgggacattgcttgtcctccagagccttccgcctccccagtatgttcaaatatgcgagattttaatatctccttgcttcagtcctcccttccttaatattgggctaatgtaccacctactttatatgttctgaggattaaatgaattaaaacatgtgaagagcttacattagtgcctgcatgtagaaagacctatagcatatgttagcagtggtttatgtgctttctttttgtcatcttatgtctgtgctgttttctttcatacttattttatgtggtcagggttaatatagatttaccacttcttgtatttctggctttctgtctgtgatcattttcccttttagacttttcttcagtgcaggtctgtgttttgcctaaaaatcgttacttctcctttattttttttcctttctttcttycaaactcctgttaatattggtattttgacctcctcccaataggtataagattctagattggcactagatacaggatttcatctcacgggaaataatctttactttgtcttctgtttcccatttttctattgacaagtcagatgtcagtctcacttcttgaagataatctacatttttttctctgcgcttaagattttttttctcctttggttttcttttagttttactatgatgtatctctgtgtaaatttctttttatttgtcctgcttaggattgtggacatcttgaatgtatggattagattcttccatctagtttgtaaaaatttagccattatctcttcaaatattgtgtatgcctctttatctttttctttttctggaacttcaattaaacatccattataccttctcactgtatcctctgttttttactccttatatattttttcatctgtttgtctctctctacctgattctgaataatttcttaagaattgttttttttagttttctaaacttggtaaacattgttactttattgtctgtatctggtaatgccaataccttaaataagtcttggtgggtctgtttctcctgtctgttttgactgtttctcactcatggtatcttgcctctttgtgtgtctggttatcattggctgttacgtttgagaagatgtgctcattgctactggagtatcactacttctaggccctctcagagaccagagctaggagagacatatgtgtatactaaccatactcatctgtatttgtttctgtatctgtcagtatatattttacatgaacagcagcaaaaaatatgagattctactgatacctctgagttgaatccagcaccagtagatctgtttattaacctctttctctaacagtaagaaacttggctctcattaactataatgtatttacttatttgttatacattatcactttttcattaatataatttacatttgtgcttccaacagaattataaattattctatattgcattctgtggaattgttctggaatagtcatgaataataaggatcaactctattataatgtatatagaattctgtttacagacataccgtgggttttgttccagaccaccacaatacagtgaatattgcaataaagcaatattcattcaaccaacattttttggtttcccagtgcgtataaaagttatgtttacactatgctgtagtctattaagtatgcaatagcatctaaaaaaatgtacataccgtacttctagaatactgctaaaaactggtaatgaccaccaaagccttttgcaagtcgtcatctttttgctggtgggggtcttaccttgatgttgatggctgctgactgatccagggtggtggttgctgaaggttgggctggctatgacaattttcttcaaatagcacagtgaagtttgccacatcaattgactcttcctttcacgaaagatttctctgtagcacatgatgctgtttggtagcatcttatccacagtagaactttcaaagttagggtcagtcctctcaaaccctgccgctactttatcaactaagtttatgtaatattctaaactctgtctcagaaaaaaaataaaaaataagccgagatcgcaccattgcacttcagcctgggcaacaggagtgaaactctgtctcagaaataaaataaatcctttgttgtcattcaacagtgttcgcagcatcttcaccaggagtagaattcatctcgagaaaccactttctttgctcattcgtaagaagcaactcctcatctgtttcaagtccaatcatgagattgcagcaattctgtcatatcttcaggctccacttctaattgtagttctcttgccatttctactacgtagatctgcagttacttcctccactgaagtcttgaacccctcgaagtcatctatgagggttggaatcaacctcttccaaactcctgttaatgtgaatatttttacctcctttgatgaatcacaagtgttctttatggcatctagatttgtaggtcctttccagaaggagttccatttactttgctcagatccataaaaaaatcactatgtagctatagcctcatgaaatgtatttcttagataataagacttgaaagctgaaataaccctttgatcctttggctgcaaaatggatgatgtattagcaggcatgaaaacaacattaatttccttgcccatctccatcagagctgttgggtgaccaggtgcattgtgaataagcaataatattgtgaaaggaaatctttttttctgagcagttaagtctcaacagtggccttaaaattgtcagtaaaccatgctataaacagatgtgctgtcatcagggtttgtctttttatggatggagccaaggcagagtagatttagcataattctcaggagccccaggattttcagaatggtaaatgaacattggcttcaacttaaagtcaccagctgcattagctcctaacaagagagtcagcctgtcccttgaaggcaagcagtgacttctctctagctatgaaagtcctaaacagcatcttccaatatcagaatgtttcatctgcattgaaaaatctgttgagtgtagccaccttcatcaatattcttagctagatcttctgataacttactgcaacttctccattggtagttgctgcttcaccttgcactattatgttacggagagggcttttttctttaaacctcgtaaaycaacttctgctagcttcgtacttgtcttctgtggtgtcctcacctgtctcagccttcacagaattaataagagagttaaagcctttctctggctggtttgcttgtctatccagaccactcagactttctctgtatcagcagtaaggctgttttgctttcttatcattcatgtattcactggagtggcacttttaacttccctcaagaactttatctttgcattcacaacttggctaactgttaagcgcaagagaactttcagcctgtcgtggcttttgacatgccttaattactaagcttaatcatgtataggtttttatttaaagtgagaaatgtgagactcatccttttacttgacacttagaatccattgcaggattattagttggcctaaattcaatattgtctygtctcagggaataaggaggcccaaggagagagagagagtcatgggaacggttggtcggtgaagcagtcagaacacacacagcatttattgattgaatttgctatcttactagcttaggcaacatggcaaaagcccgtctctactaaaaatacaaaaaaatttagccaggcatggtggtgcttgcctgtagtcccagctactcaggaggctgaggtgggaggatcatctgagcttgggaagctgaacttgcagtgagccatgatcatgccactgcactgcagcctgggtgacaggagtgagtcgctgtctcaaaaaaaaaaaaaaatagtttactgtcttagatcttagatgggcacagtttgtggcaaaaacaaatctgtggcaaaacaatgacaatgttaacctcaaagatcactgatcacagatcatcataacagatataataataatgaaaaagtttgaaatattgtgagaattaccaaaatgtgacagaggaagtgagyatatgctgttggaaaaatggtgctgatagacttgcacgatgcagggttgccattcaatttatttaaaaaaacaagaaactgtgaagaacaacaaaacaaggtatgcccatactccaaaggtacttttaagaaatgaatttttgaaaggatttgaaaatcaaatgtgttaattttgactgctctttatggatttggcattttgtagttttgattatgacacaagttatacataagtttaggtgtcactggacttgctttgcatctttttttkgtttttttactaggtcttaacttgcagagtcagtttaatctggaaaatgtcacwgttttcaatacaaatgagcaggaaagcaccctgggtcagaaggtgaggctgatttgaaatcttctcagataacatatttgcaagtttgttattaagatagtgggtccaggcacagtggctcacacttgtaatcctagcacttygggaggctgaggtgggcagatcgcttgagcctaggagttcaagaccagcctggacaacatggcaaatcctcattcctacaaaaaagtacaaaaattagcagggcatggtggtgcacgcctgtggtcccagctactcgagaggctgaggtgggagaatcgcctcagcccagggaggtcaagctgcagtgagccttgatcatgccactgtactccagcctgggcgacagagtgagaacctgtctcatttaaaaaaaaaaaaaaaaaaaaawtttcatgtaaatgggcctacaagtcatcaaaaatttaaaaacttttaactttatttccaacttacagaaataatgttttgtatgtaaaaaattcaaccagtgtttaagatagaatgtacagttattctgtaatccaaggtagaccatggtagattatggcatagctttctattaaagtggattaacaaagtagctatactttctgttttaatagtgttaatcataaggtagattatagaatagatgtactttctgttttaaacattgggttattttttgcagaatatgtattttttctataaattcatattatttctataaccactcataacattctctgtctcaccataccaggactttttgtgtatatgtacaaacatgttgtttttctccagaatgaggtcattcatactattctgaaattcactttcttcctttaagatttagttttatcttagtttttaaatggctcttgataaatctcagagtggatatatcacatttctctgcctgtggacattcagattatctctgatagtgaaaaacaatgttacagtgtctagtagtgtataatattgcatcagtctgcagcgtctgcatcaattatgcagatgtctttttaggataaattccagtaagtaaaattactgggttaaaatatatgcatattccatatttcaatagctattgcctggttacttctcaaaaaggttataccaatttatacagccaccagtggcacatggagaatgcctgccctttttccccacagcctcaccccaacagtgtgaattatcaatttttaaaaaatattggcttaattgatgtatatatttgaaaaataagtcttcttagttttaatttcatttccttgatcattattggtgttgaggaacttattatatgttggttggaatttatttttcttctgtgaattagctattcatgctgtttgctcattttattgttgaattgtcttgtgcatttccaaaacatttagccctttattcccagagggaatctattgattatgtttagaaatgtagatttgaaactttctactgtcttcatgactgtgttatatcattgtcatactgctcttgagttcttctgtccatcaggtaaaattctgattgccttacagattaactataggtctagatagttagtgactagacttctctaactgtgggttgcctaggaatgtgtaactgaccacttattctagcatttatctcttctgtctgatgactgcttcatgacaggctatacatttttttttcaatttagcacactgaagatagagaagaaggaatggatgtagaagaaggcgaaatgggagaygaggaagctccaacaacgtggtgagttttcagagcctaagctttttgatttacagagataatctcctaatttattgagtatcctctctggagtgaggagatagacaaggaggaaagaaattataagaaatttctttcatttgtaattttcatgtatattacttaataaatcgtaaatcactaatgggctttatctgctggtttctatattatgtgcagacagttcattgtttatatagactaccctatgcataatcccagcatttgaaaagccaaccacaggcagccttaggagctcctccccttaatcccttccattaaacttgtggacccagtgcctgtgtgtattgggctaacttttaatgaaataggcaagttaagaagcctttcctccttctctccccttgctcttaaaactgtttcttatctcctcctctgtagccctgtgctttctttccaaaagcaatcctcagtggcatagataggttctagaaactgcaacattaagtgaaatgatgtatratgaaatcaattttcccataggctaacaaacaaaagttaggttcttatggcctatttctggtcacaaaaacaatcaccaaactcctagataaagatcaaaatgcttctgttattaaacattgaataaatgtgagctatacatgcatttgagaaagattaataaaaacaagtaagataattatttgcctagttattccaatttaaggttgtgggtggccagagcctgtcacagcagctcagagcgcagggcgggaaccaaccctgtacaggacgccatctgctcacagtgtgtatacccacccacccacactcacttatcctggaaccatttagacatgccagttattttcatgtacacctctttgggatgcaggagggaatctgactacctagagaaaacccacacagacatagggagaatgtgcaaactctacatagaccgtggccccagccaggaatcgattttttttttctcatcaacgttacaataaaacaatgttgaaggaaacatcgttatttgaagactttccataatttcttcctagtgctggcttagaagcaatgagcaagagaaaagagaaggcattaaggaaaattttccttcactggcactcttccaggtgtctgaggtgatgagagtcattagttataattgaaagaatttccattactgtctagaaaatcaagatgggattcctgtatctgcccagggagatgtatttctggcatcccagaattcaaattcaaacacatctccagaagaaacattagaggtagtgtggctccaagcttaactccaatacttcctagtcatgtgacctggggccaattacttaaccttctacaacacagtttccacatctttaaaatgtagtaatgccacctactctctacagttaagaggattaaataagacgatgatcagaaatagtctattaaggcactaattgtttatatgtagtggtaagtgtaaagcacttagaatattgtctattcagtgtctagtagctattatttgttatcgttattatttttttttagagacctatttattcattatacatgaataaagtaggctttaaggtctggcctgagcaacataagggctctggggcaagttagtaggctacaagatgatgagtcacctgaagtgtaaacagcccaaaagacactggccagtgcagttttgtctgcttagattttgcctaagactgtatagacaattcatccctattggttatgtttgtaaatcacttaaataagactcaacactcagctgcctctgtcacagtcactaatgttgaatagagggagaaaatacgtgaggaattactttgtgacagctgttatcaccagatggtcttaggcactgtaatttacaaagcagaactcattacccatctacctacaatatgaagtccatttcagatttggctcaaatacaccagtaaacatttttgttaagaaatttcaatgtataacatcctgtaaaatagctgaacatttaaaaaaatatatcaagttttccagagtttttttggttaaaatagttacaagacattctattttacatagtaactgggtctctgatttgttattatttgcaaatacaataattggttacatttgctttgtgtgggtaaacagaaaattcaaaagtttctgtggagtgttgaaggtggaaggcaaattgcaagtgggttgaagaatgaacaggaaggtaatgaagtggtgacatggagtatagacaactctttgaagaattttattcagctgtgaaggaaaagagcaagggacagcatctaggagaggggactttaaatttttaaaaatatattaatgcctcaactgtaaaaactgcctaacagtaagatattaacactacttcaaaatttattctgtaagacacctcaaatacccaccaagccaattaaagataaaagggaagagatcaaaagtcttttacaggtaggagatggyaattagcaacrtggaataatattgtgattggtattaagtgttaaattagatgtgaagttcttagcaattgagacmaaaagggacatataatggttgcatgagtctcattctctgttagrggtagccccatttttaagagacaaactttcctggtacatttcaagaggtatttattatattcaatcttacatgttgtaactgagtaacattttgttactcagtgtgtgtgtgcacatgcacttcagaaacattctttatcaaatgtatggaactatacaaatattggttcttgttctttcatgaatgtaaataatttatatagtgctatttcttttctctatttactttaacgttttagggaatgttctttttgcggcttttttttttttcttttttgagacggagtctcgctctgtcacccaggctggagtgcagtgctgtgatctcggctcactgcaagctctgcctcctgggctcaagcgattctcctgcctcagcctcctgagtagctgggactacaagcacgcaccacaatgcctgggtaatttttgtacttttagtagagatggggtttcagtatgttggccaggctggtcttgaactgacctcgtgatccgcccgcctcagcctcccaaagtgttgggattacaggtgtgagccaccgtgcccagcctgtggctttttttaaaaacccaattcatagaaaacccagaggtataatcttactgttgtaaatcagtgaagctgctttaattatagagagaagttaatgtgtacatcattgttttcctactttcagagttgttactagggaaaagtttaggaagagcgaaagtaaacatgcccattagagtctttcagatactactaattcatgatgaaagctttggcaagaactagatttagatttttgttagttaaaagtcagtattcttcactgttgattttcacgtgcttcagatactagccgtttatcagatattagctgttttaaaaattaaaagaataggccgggtgcagtggtacacgcctgtaatcccagcactttgggaggctgaggtgggcagatcatgaagtcaggaactcgagaccatcctggataacacggtgaaatgctgtctctactaaaaatacaaaaaattagccgggcatggtggcgggtgcctgtagtcccagctactcaggaggctgaggcaggagaatcgcttgaacccgggaggcggagcttgcagtgagctgagatcgcaccactgccctccagtctgggcaacagagtgagactcctttaaaaaaaaaaatttaaattaaaagaatatgtattgacactgtagatttgtgacatatcaagattagaagttgaattagtagtgccataataaagttactagataaagggcttatttttgtgatgctaacttgatatgtaccatatatgtttttctcatactggtgcttcttaggatataatatttttagttaggatatgatacctgtgacttttaacatagattcagattaacattggtttaaacaacataaaagttgatttttccccctcatatcgaagtctagaagcaggcagtccaaggctggtaagggagcactgctcggtgagattgcctagacccaggcttcttctaccttcttcttccatcatcttggtgtttgccctttttcctgtagtgcaaggtggctcacgctcacatctgcattctagccagcaggaagaggaaaaggccagtgataaaatatggcccaaaagttgcacatatgacttccgctctcaactgattggccagaatttaatcacatgaccatgcgagcagcaagattggttgggaaacataatctttaattctgaataaccatgtgtccttccaaaattcaggggctccaccagtgtagataaagagtctattggggtctatgagttccctaaaatgatttgtaaaagtttatataagcatttgtgaatgtgtacttttctgataactttcattagcttctgaaaacggtttgtgaccaaagctaagttaagaatatttagatatttgtaaaagaatttgaatgatttatttaatataacgtttattttattagctctattccaattgattacaacctgtatcgaaaattctggtcacttcaggattacttcaggaaccctgtgcaatgctatgagaagatttcatggaaaacttttctcaaggtaagttgccattgmcagactatcagaagcccagtattttatagacagtgatagagctaaaacttaatcttgtctaacatacttttcactatgtaattctgcctcttacatttttataccaatttcataacaagtgaaattataaattaatatttaaaccactaatattgtgaagtagtatataagaatcggatatttaaaagttcgtcattacagccttgctttttttgaatataatgagtgttgttaacataaattgatattttgcagaatatattctatctttgtacaaaattattttagctatcttgttgaaacagaagtcctcaagtcatggctctgggccagatctaacctactgcttataaacaaaggtttattggaatagtaccatgaccatccacttacctgtggctgtttttgcactataatggcacagctgagtagttgcaactgagattataaaggccacaaagcctgaaatacttactctctggtcctttacagaaaaagtttgccaatcctgttttagaagaatttgttatatttttcttggctacttaaagatcagttgtccttttttgtcataattaaaatctaagataaataggtagttctcagaatagcatggtgtgtgttatgttatttttaatagtttttgttttatatgcaattttttgtgggggcagcaccatccaaattcagattaagtggttagtgagaaataatctggaattgtcttctaactggacagaatttggtggaatttatttgctcagtttttagcacaagaaatgcgtaagagtttccacaggtggttaaacaatttcactggtaaatttctgtacactcttaaaaatgttccctaatctatttgtcccttacacagacttcttaaatcatatttcttcgtttttttttttttttttttgagacggagcctcccaggttcaagggattcttcagcctcagtctcctgagtagctgggactacaggtgcccgccaccacacctggctaatttttgtatttttagtcgagacggggtttcaccatgttggccaggctggtctcaaactcctgatctcaagttacccgcccccctccgcctcccgaagtgctgggattacaggcgtgagccaccaccactggccaagaaattatatttctttaggagtagggagcttgtacctacttttgcaacaagtgaaatatcatacaaaatagttttaactcccattctgctatcataatttgtattgttagtgtgccttgcaatatacagtctacatacatgattgactgggagtaaattctaggcattttgatgcagaaaagcactaaacaaatttgggtaacaatgtcgaataaaactaatatttttattttgcagtattctgaagaagttttagctgtttttaagagttataaattagatgatactcaggcctcaagaaaaaagatggaagaattgaaaacaggaggagaacatgtatattttgcaaaatttttaacaagtgaaaaggtataagtttttctttttcattaagcataataagaaatggtcttgttttatttccgtttagctgacagcctttctaagttaaactgaatagaaatgtttcttattttactttgggttaaagctgattgattaatgttagtttgaaagtcccatttcttcctttcagaagtaggactaatttggtttcaaaggtgaaagtagttctacattaagtctgttttgtaaactaattttggaataaatgcagtttaattactttcatgtctatatattttaaatgtcaagttaggatttaatttgtatatgaaaatatttcataattattatttaggtgcaagtaaggggtttaaaagttccttgttaatcttatttatacattttaaaaagtaaattttattcaaatataatgctacaagattatgtaaagtttctagtcaagatggcacattgagtttatgtttcgactcactccctttgctccaaacacatagcaatgacgggtaaaatataaacgagaaaacaaaagagacaaggctgggcttccagaaacaagataaatatcttcatggaccagaaatgccaagtagtgagcaaaactgcagcctgggcctgctggactctctatccaaggcaggtggtggtgtccaggaatttggctacaagtaacagagactaaatgtgcaccatgtgggacaaggggccagagccagattcacttcttgaagccaaggactagggtggaacttttatccagttttgggaagaaactaagaaaaaatattgccagtcttctgccaagggctatggttttataggaagttgtgagcctagggataacaaagacagcttkgtgtccatctgcttgctcagtgaccagatatgtgatatgctcagtatacttatgaaacagctgctccaagaagtcatcataagacttcttctagacttttggactcaggggccctggtagaagcagatgcaaaactgctagacagggaaggatgtacacagagagggaggggaaaggaagtaaacaaacatcccaaaagaaaaggctcctgttcaaaactctgataaattaaaattccaaaatccataaatctaatgctaagaaggatcaccagcaaaatcaactattgggatatatatatatatttattccagatgaaatatatagcctgaccaagactttatgtatgttttggatactcaaaaagataatcgatgagataacatccattgaaaaggaacaagaaatcatgaaacaaaagcaggctgaaatgaagtaggacagtcgatacaactaatcgggagtcttgggaatgaaaaatacaataattgaaaccmaaactcagcacacagaattaaactatacactggacatagatgaacaaagaactagtgaactgaagaaggtgatgagaacttcatccagcaagcagcacagacagattttttttttttaagtggaagagcagttaaaagccatggtgaatagatkgggaatttccaacatctgtctagtaggatttccaaagaagaaaatggagggaatggtagagaaactggattgcaaagaattgaaggaaatctcaaatcctcagcttaaaagtgtgtcacaactgccaagcaggataaagaaagataaatctactcttcattacatcatgccataactgtgggcattcagagaaaacctaaaagccactaagggataagaaagacaaatatactgggaaggcacagcagtttgactgttagcagatttctaacatatcaaccattaataccagaagacagtagagaaatattaaagtgctgaaagaaaaatgacattcaatctagaattttataccgagttaaatatactcaagactgtcgatgaaagaaagacatttttatttaaagaccaggataacttaccactcagtgaccctcattttgaaaaaaactactcaaggatgttcttcaggaggaaggaaattgaacccataagaatggagtgggatacagaaggcaacggtgagcacaaaaattgaaaaatatgacagtaaatttactattgactataaacacaaaaaagtcatgaatgatttaaaatttttttaattaaaaaattttattaacgtggaacttaactagatgacagtaataatatggaaggggaaagcagagatgtttagtgagtaatttaaaattatggcagtccttgtaatcttcaggagtaggaaaggaatactgaatattccttttcatgtatattaaaagggtaaccaccaaaagaaaaccaacttgttgctctcaaagaacagagatcaaagggaggcagggaggaatctagaccactttataaatccagcgaatggcagaaaaaaggaagagaaaggaggagagaaataggtcagtaataacaagtatagactgatttaatatacctaataagactttatcagattggatttttaaaactccagctatatttgttaatttaaatgaaacaaatatagaaaccttttggttaactaaagaattcaaaagttttattctacttcatgtgtaagaaaatcccaaagctcttcttgcttaacaaagaaccttcccaaggttacctacttttagaatgcagaggtgtcagtttaatattatcagggcaaaaaagttacaaaataaaacaaccagtaagagttgtgtatttttaagagttacaggtccacatttctcaggacatgacagctatttcaaaactctggatgtcttaattgatatatatatatatwtwtttttttgagacggagttttgctctgtcgcccaggctggagtgcaatggcgtggtcttggctcactgcaacctctgccacctgggtttaagcgattctcctgcctccacctcccgaacaaatagcatttctaaagacattttagtaatgaaaaacagcaggattaaacattttcagagaaatctccacattggaatatgggattgatgcttttatatcattctccattcactttgtcacacttggctttctaatagtatctctccttttctgattctttgtgaacttgctttcaccagcagttagaacatgaactttcaggattaagcactgaaatttcattaattaatatcacatcacgaggaaggtaaaaacagctttgagaagcttaaaacttaccataggagtaagaaaaaggcacaaaattgtaccaaagagaatgtgaggcatgtaatgttttgcatcttcatttccctttgttgccccttaagcaacaactttgtcttaaatttacagtcctctttgtacattcttcatattttttggtgtatttttagtttttactacttaatatacaagtgaaaatatttgtaatgcattacgtgtatcatggaaaatatgcaacattttataagctttactgctgcactgaaagaagccttccagcatctctgtaccttacatggtgttttgatactaggattcccaaaaaggccttcacacctaaatatatgccagttttgggcctgatgttactttcaacttttgatatagatttggtaagtcatgagaaaggtctggatttttcagggatatgggtgccatattccttgccagtaagagctagctaaagtgaaatctaaagctatgattatttggagcataactctttagcctatcatttcactggtgagcaggtttagaaaagtgcttgtcattacaaggttagatctttcatctctgtaatagagccgtgaccccatccaatgggaatattatccagaagcattgtgttttgttacatgaatctggtcagacttttccttagggayagtccggaaacaatgcttggcaaggatgatacaaactttttttttttttttgagacactttttttttggcccactgtaacttccacctcctgggttcaagcgattctcgtgcctcagcctcccaagtagctgggattacaggcrcccaacaccacgcctggccaatttttgtatttttaatagagacaggttttttgccatgttggccaggctggtctcgaactcscagcctcaggtgatctgcctgcctcagccttccaaagtgcagggattacaggcgtgagccaccacgcccagccagatgatataaactttatagttggagataggccagtcatgtggcaactacaggtaggtagaggttctacaaataaaatgggtgtctttgtaaattattgtgtcttccttcttaaagaaagaagtttcccctagaaacaaagtgccacatttttgtactacctggagtgtgattctgaatactagtgcccaacagtatagttccctttttagcagagcaaaataatccagggttactacttgctaaatgtagtgctgatacacctgggttgcttattttctaatgcagtggaaaagtatctgttctttaaggttagtccaggatcatactcagaaatgttaagggaggattttacctctaattgttcaacttataccaaataaaaggcactggtattgtagggattcctccctctgtactatgtagcatgtaaaagcagaacaacatttcaaaatgtttaagtaccatgagtattaccatgatggttaaaggaatatatttttggatcttttaagttctcacagaaaagagtataataacactaattagatataggctttagggttacccagtccttcagaataatacacttctcactttccatctgagactcaatgaccmaaatgatcagatggaatactcagtggctagcagttaccagggtgaggttacccacagttatgtactgttgaccctagtgtggtcattaggccattcattttcatggagaaaagaaaattcacaattttgcttggtctctgcattgtgtgaagaggcctctagttaggacttttggtcattttttaaaaaaaagttcctggcagtaagaaactatccatatagtcattstgccttaaatgttttgtactttttatgtccatttgagaggttgaatctttatgtagtaacggctaaggtgggtctcttataagatatactatagcctagctaggagcaaatgaaggcagaagcaagaccctcctgttaacaagtgggcaggctaaccactatgctacaatttttttttttatctcattagttgttctcggcatgggaggcttttagatagctctggaacagggttgcacagcaggaggtgagcagtgggcaagcaagcgaagcttcatctgtatttacagctgctctccatcactcatattaccacctgagctccgtctcctatcagatcagcagcagcattagattctcataggaacatgaaccctattgtaaactgatcatgagggatctaggttgtgtgctccttatgagaatctaatgcctgatgatctgtcactgtctcccaccaaccccagatgggaccttctagttgcaggtaaacaagctcagggcttccactgattctacattatggtgagttgtatatgtatttcattatatattacaatatattaataatagaaatgaagtacacaataaatgtaatgcacttgaatcatcccaaaaccattccctctaccccataacccctggtctgtggaaaaattgtcttccatgaaaccagtccctggtgccaaaaaggttggggatccctgctttagaagtcttttgctgacagwcatgtcagtcttagcatatgggtgtgctttcactcgtcctgtaaaggtaaatactatagccaaaaccttttcatatgattgtaaaattgacttgtaatggtcttcagggcggaaagcatgaactaccctctgttttgacatttttgaactctggtcctgacagatagaacagttctttaaatatcattgagcatattacaaaacttagagcatactctgccattgttatttttagaataacctctgtgtgtgagtcaagccatggttatacaagcaagataagaaagtaaagtgattgatgctaccaagtagcagccctctaggaaagaccaaagacagggtgcagaagatgtactgccaaagtaggctctgaatttggagcctaatcttgaagagaggcaaagtctgaaaggcttagcagaggagactagttatttgataagataaagagcagagatagaataagaagtcacccaaccttcttattagccaaagtaatagaaattaatactgactataacagaaagaccattacaaattttagatcctctagaaatgagaactctcattatttttacaacagtgtatagtcatgattacacaaaagcataacaaagtcatatttataaatgttaatagacctttgaaaagaaaatgttctctgatgaggacaataattttggactcctggacagactctgtagagggcaaaaaattattacctggttataaatggacttcatacccagaggaaaaaaaaattttttctctgtgttaattgggctccctcctctattatatacaagtgtttattagttttcagtatactttgatatgcatgttttaatagatcagtgtttaataacagtattatttaaaactttggtttttaaaacaattctatcatgtttaatatgtaaacattaactgatttatttcatcctgagtgttatgaagaacaaacatgttaaggtatagtcagagatacataggtttaaaaacatatgaatcaggccaggcacaatggctcacgcctgtgtcccagcactctgggaggccgaggcagacagatcacttgaggtcaggtgtttgagaccagcctggccaacacagcgaaactctgtctgtactaaaaatacaaaaaattagccgggcgtggtggcaggtgcctatgatcccagctactcgggaggctgaggtaggagaattgcgtaaacctaggaggcagaggttgcagtgagctgagatcacaccactgcactccatcctgggcaacagagcgagactctgtctcaaaaaataaataaataaaataaataaaagtatcgtatgttagggactttttatgttttctgtgtctgaattttaactttttgtagaaattttttcaatactctgtaatcctatagaatattaaaactttaccggatagcgtaagaatattctgtaaattcatataattttcagtattgtctgagatttatgaaaaccaatatataaacactggctgtttaatcacagcttgatttagttgttcacccatgtttatgtgtaaataatcctgagttaataatagaggtaacaacaaaataaccaatgttaattagaaagtttcattttagccttttaaaggtagaaaagtcttatgtttattaaaattctatatttgtatcttttttctaccttgtggtttaatcaaagaaaagtcataaagtcatcttttaaactgaaaactttcaaacagtactaatgtaaaacattaaagagtttgttttacattgactatgagtattaaggaaaatgaaatttaaatttttgatatttattttattgaggaatactgtagccttctaagtctacttcacagtacagtcatgcaccccataatggcaccacataacaaccacataactggtcaacagtggaccccatgtacaacagtggttctgtaagattatagattatataatactgtgtttttactttgccttttctatgtttagatacacaaatccttaaccattgtgttacagttgcttacagtattcagtgcagtaacatgctctacaggttcgtagcccaggagccataggctgtaccatatagcctagttgtgtagtaggcaatactattgttaagtacactctatgatattcacacaatggggaaattgcctaatgacacctttcttagaatgtatccctgtaggtaagcaacacattattagtacagaaagttgcttaaaactttttaatttgagactgtatcttcaggttacctttttactaaataaaaggattgagacttgatagctcctgccttcagtgggcatctccttttatcttataactcagcagggacactgagagacctttaagctaaaattagatttttcatttttttaagaacttttttttgaaagacagtttgaaaagaattattagaaagtagagctgggtgcagtggctcacacctgtaatcccagcaccttgggaggccaaggtgggcaaatcacttgaggtcaggagtttgagaaccagcctggccaacatggtgaaaccccatctccacaaaatacaaaaattatccaggcgtggtggtgcgtgcctgtaatcccagctgccctagaggcggaggcatggggatccattgaacctgggaggcagaggttgcggtgagccaagattgcaccgctgcactctagcctgggcaacagagtgagactccatctcaaaaagaaaaaaaaaggaatactatttaaatttataatttagttgtttttatacaatkgtttacacattctttttctcagaaaccaaatgttttctatttcaattgagtaagttatatggaaggtactattccaggtagaaaactattgtacagtttagtcctctagaccctaatttaatatctaacacatttgtgaaaattaaaagtttaaattgtttaamgtttaaagcgaaatatttgtaaacatactaactgtggaacctgtattttttttttcctaatctggggagaaaatgggtatattcaaaacattkggtgtttaggcttgatttcttaattgtctgggcagattttaacagctcgtccaggattatgtaagcacttagtggtgcctttcaacaatttaaaaaggaaatccagtatgtgaagcccagtgtggtggctcacgctcgtaatcccagcactttgagaggtcaaggtgggtggatcacttgaggccaggagtttgagatcagcctggccaacatagtgaaaccccatctctactaaaaatacaaaatttagctgggtgtggtagtgcgcacctgtagtcccagctgctcaggaggctgaggcagaattgcttgaacccgggaggcagaggttgtagtaagccacgattgtgccactgcactccagcctgggtaacagagcaagactctgtctcaaaaaaaaaaaaaaaaaaatccagtacatgagagatttagtacttttctagaaatctctcaagccacacagtctgatcagacttatatacagtagaaactgtagagctgtgttcttttcagagacttaatacttttttgagaaatatgcaactcctgcagtcatgctacagaaagactaccctcttgcctactccctgacacacaattyatatgggttttcacataaaagaaaaaaaaaagcctaacagtcacaggaaaattattaaattattaggccaactagaggtcatacaagagcactttgaaggagtgaaaacattctgaactaactcaaggttaatagaagcgatccttttgtgtactgtacctcactggggctcaagagcaaaacataaaatcacatttacacagatgctctgagcgtcccatgtaccaaattgccattggtacatttgtcttccgggtgcaccagtttccttttaatgaggtttgcatcttagaatcttattctttcgccgggcgcggtggctcacgcctgtaatcccagcactttgggaggccgaggcgggcggatcacgaggtcaggagatcgagaccatcctggctaacacggtgaaaccctgtctctactaaaaatacaaaaaaaaaaaaattagccgggcgtggtagcgggcgcctgtagttcccagctactcgggaggctgaggcaggagaatggcgtgaacccgggaggcggagcttgcagtgagccgagatcgcgccactgcactcccgcctgggcgacagagcgagactccgtctcaaaaaaaaaaaaaaaaaaaaaagaatcttattctttcctagttatgcaaagctgagttctgtaattccatgattttcagtaagaaggaaaaaagcagacctaagaagcttaaaacttacatggaaaataaaagaacacaaaatttaataaattgaagatggagcagtttgtatccacaagggatatatacctaaaacaaaactcatgattgaaatattaggatggaaagagacataccaggctaataccaacaaaaagaaagctacataaataacaaataaaatagaatttaagggaaaaagtataaataggacaagaaacactacataataaaggaatgaaccaccaaggtgtcatgaacttatatgtatttaacaatataccctcaaaatatattaagcaaaaacttacaaaattatgaaaagttggcccacaattacagtaygtatttttaactgcttctgatggatcaggttgactaaagattagttaagtatatggaagatttgaacaatgacagtaataagcttggtgtagtatagaacaaatagaagcaacatatttctttttgtgtatacgtggaacattcacaaaatttgaccatgtactaggtcacaaagaaattctcagcaaatttcaaagattatacacgaagaacacattctctggccacatttctctgtaatcaaattagaattctaaaattagagctgcaaaaaggatagcttaaaaaaaggcaaatatatgaaaacataaaaatgcatttcccaggagttaaagaagaactcataatggaaattccaaatttgtaataaatgtatatcaaaattgtaattataggaagaattacatgtcagaagtgtgggttgcaaataaagggagatgcaaagggacagttaaagcttcatatgcattaatggaaaaaatgtcaagaaagagtgacaaattgagcgttcaactcaagaagttagaaaaagtacaaaataaagctcaagaaaatggaagtaataatagcacaacttagtgaaataaaacaaactaaaacatatcagcaaaactgaaagtgtttctttgaaaagaaaatgttataaaaagaaatccagagcttgtgcaaggaaaatgaaaagataccagcaaacaatattaacagtaaaaattgacatagagatatttcaaatgattaagaggatattatgaacaactacgaataaattttgaagcctaataaaatgggrattgtttagaaaattttaatgaccgaaatagactctcaaaaaaaaaaaaaaaataraaaaccaawtaaatgaacaaccattarggaaataccagccagaatgacactttttgaatgacwtcaggcccagaggtttttaaggcatatcttatcaacacttcaaagaataaataatttctaccataaatgaaaattttcagaagttagaaaaagagaagccccccagttcattatgtaagattataacttaaaatcccaataaggacagaacaaggaaaaatgtgtatgtatattcatctcacatataaatagaatgttttctatttatagaaataaaaaatgtcttacmaactcacaaattaagtaatttttttaaaaatagagacatacagtttatcctaggaatgtaagtatggttcatcagaaagatgaatataatgccagattaacaaccgattggctgggcgtattggcttacgcctgtaatcccagcactttgggaggccaaggccggaggattgcttgagcccaggagttcaagaccagcctgggcaacacagcaagaccgtgtctgaaaaaacmaaacmaaaaaaaaacagattaaagatttttaagatctgtatgatcatctcagaagccaagaaaattcaataaaatctaatattcmatacaaaaagtagaaaggaatgttctctgagttgataaaggactgattttaaaaaccctattgcaaacatcatacacaattatgaaactttagaaagtattcccattaaatccaaaaagaagacatggatggacactaaccatatttctgttcaacaccgtactggaggatctaaccatttcaataagagaaaaaaacaaaaaaggagtaagagttataagtattggaaagaaaagagtaaactatccccatttgaagacaatataattgtctacagagaaaagtccaagagaaccaagaaactgttagaactaatgaaacttcagcaagattgcaagagaaacatcaatagtgttcttataaaccagtaatcaattacaacatgttattcagaatagcagtgaaagctctccaatacctaggcgtaatcttcatagagaaacattacaaaaatggagcagtgtttctacatttatagatacagacccagtgccccttctccccagatttattgattcagtatattttgaatcagtatccaaatgggttttttaatttgagttatacccaaaggaatataaattgttttattataaagaccaaatgggttttttcatgggaactcaaaaagttagtcttactatttctatggaaaagcaaagagccaagagtaagaaaaccatgaagaaagcgggaacacttgctgtgtcagatattaagacctatacagcaatagtaattagggcaggtaattattagtactaatatacagaagaagaaaactaaaacaatagaaagtccaaattgtagaaaaggttaatatacaaaagaagattgcattataaactagtgaggaaaggatgaattatttatttatttgtttattttgagacagagtttcactcttgttgcccaggcgagtgcagtggcgcgatcttggctcatcgcagcctccacctcctgggttcaagtgattctcttgcctcagcctcccgagtaactgggattacaggcatgcgccaccatgccygggtaattttatatttttaatagagacaaggtttctccatattggtcaggctggtctcaaactcccaacctcaggtgatctgcccgcctcagcctcccaaagtgctgggattacaggtgtgagccaccaggcctggcctattcttaataaatgttgcttggacaattcattatccatatggaaaaattaaaattcagtctatacctcagtacagtcaattctaggttaatcaattccaggttaattgaaagtatgaatgagaaaagcaagacttttaaacatttagaagaaaacatgaaatatgtaaatttggagtagggagagatttcttgagctacaaaaagcacaaattgtgagggaaaaatatcaatttagtatttaagatttaatattaagatgtaaaagtcttgaatagcaaaagataccgtaggcaaagtaaaaagacaaggcacagactgggagaagattatttgtcacctacataaccgggaaaaattagtattcaaaatattccattgataaaagacaaccaaatggaaaactgaaaagatgataagaaaaagtaatttaaagatgtagaaaactgaatagtgaatgagcttataaaagttgctaagcatctctagtgcagataaaatatgagataaccatttcacacttagcaaactggccaaaattgaaaagcctaacaatactagtattggcagagatgtgggaaaatgagaacttttatacactgttgaaatataaattgaatcaaccactttgcagaatacttttgtaaaaactagtgaagttaaaatttgttcctaaatatggccccctacacaggacccacatacacaaggaaatctctaagaagattcactgtaccattgtttgtaaatgatgtatttgtaaatgaaagtttagaaacagtgtcaatgttcacaagcagaagactgggtgataagataattttacgtgacagttctataaagcactgaaaatggattaattatagcaggggttggcaaatctggcctatcatctatttttgtagataatttttattgggccaggtgcagtggctgtaatcccagcactttgggaggccaagacgggaggaytgcttgaaaccaggagtttgagaccagcctgagcaacaaagtgatacccccatctctacaaaaaaattttaaaatgagctgagtgtggtggcatatgcctgtagtcccagctacaggggaggctgaggcaggagaatcacttgagctcaggaggtcaaggctgcagtgagccatattcatgctcctgcattccagcctggctgacagagtcagatcctatctcagaaamcaataaataagaataataatttttattggaacacagccaccctcattcatttagattgtctctgactgcttttgctctgtaacagcagagataaatagttgtgacagagatatatagtccataaagcctaaaatagtttctggctggtccttaaaagatttgccaatccctgaactagagcaacatgtattaagatgggtaaatttcaaacatagtgttgtatgaaaatagcaaattgcagaatagcacataatgtgtagagtttgaaacagtgcaaagtacatccatatattatttatagatgtttacatatgtagtaatataaaatgtgtataaaaatcctaaccgtgaaatacatggtagtggttaccatagtagagggagggagggaaataggagtggggagggttatagagggagcttcaacaatgtctatgatattctgtttctttaacagatatgtaacaagtaaaaaatgttaggattttatatgtagctgggtagtgggtacatgaatgttgtattacttaactatacctttttgaacatttaaaatatttcataatttaaaaattggataatttgatctcagctgatgtgttatgacagttggtaagattttaatgagaatgttctgaatattttctagcacatgttttttatgtattttgtgttaaattgatagaaatggaagatttcatacactttaattttacccaggaatattatttatatgtaaaattgattgacagagaggcatgtaaggatgactaaaatgaaaagcatgagcctttttagggttagaatatcgggaaaactgaggcctgagctaagatgtgccataaaagctaaggacagtagcctagtccagtgatgtatgcctgaagttccagctatttaggagaccagggcgggaggatcacttgggcctaggagttcaagttcagcctgggcaacatagcgagacccttctgtactaaatacatacatacatacagctaaggataataaaagccctttgctcaagatacaaagacatttacaaagaaacatttgggccaggcatgatggcctacacctgtaatcccagcactttgtaaggctgaggctgcaggattgcttgaagttcaaaacagcctggagttcacaacagcctgggcaacaaagtgagactctgtctctacaaaaaatttaaaagaaaaaaattagctgggcattgtggcatatgccggtggtcctagctactcaggaggctgaggcgagagaattggttgagcccctgagttcaaggctgcagtgagctatgatggtgccattgcactccagcctgagaagcagagtgagaccctgtcgctaaaaataataatawtgaaatgtttgacccatgacatagtgtaaatgatataattttttaaataaccaaagaaaaatggaactagatagtagatattatgaaagaaagggtacaattgagtgtattagttttactctcagctgtgtcactaactagctgtgtaatcttgcctaggtagttttaacttttctggacctagtttccttaagtataatgtgaagcagttagcttgaatcacattaggtcctttccacccctgattcagtgttttgttgactcctattttcaatccattgtttctatcaaggaaaatctttcaacataaaaaaataaaatgaacagctagtaagcatcacctagccactttggttcgtctctttaagctaggggttcacatctctactccagatgtattgaactgtgtacttcggtccttcaaataggccagtctcttatttggctccccttcttgcacccccatcccccaacccccactctccacctttaggtttgttccttgttgagagtttagatgctgctttctccaggaagccttcctagagttgcttgggcaaatggatgttggagcctctcattgaattagccaatgctggagaacagcttttgtggaggaaattgatgttttactttgttcatgaaatctgatcaggtgtcagttgaacattcaggtagagatgtgtgataggttgtctagtgtacaaagctggagactaggaacaagatctaggttgagagtatagttgtaggagttaccagtttataaatggtaattcaaactgtagagtgtatgaaatgagctaaaggggagagtgtagattcagaagagaagaaaatactgaaatccyraagaaaacccatgtttaagggagaatgaagggasaagaggagaagattgaagagtaacctgtgagattagagaaaaactagaaaagcatgcactcatggaagccaagcatatcaagtaggatgaggacagtaaagagtgttcacaggatttaacaacaaataagtcattggtgatcytgacaaaacactttcttcccccgccccaagaccgattgttgctctgctgcccaggctggagtgcagtggcatggtctggactcattgcaacctccgcctcccaggtttaagctattctcctgcctcagcctccagagtagctggaattacagggcatgcaccaccacgccccgctaatttttttttttttaaatagagacggggtttcaccatgttggccaggctggtctcgaactcctgatcttgtgatccgcccgcctcagcctcccaaagtgctgggattacaggcgtgaaccaccacacccagccgacaaaaacactttcaatggattagtggatgaggcggtcagatgatagcaggttgaggagctgattggcaacagtgcctatagtcaattattttaagaagctttgctgttaaagggttaggtgagaatgtgggagatttttgagggagcttatttaatgcttatggaaaggagcttggaaagaataggttgtagatacagaaaccagggcagttagttgatggaactcaattgttagggatattgggattccagatggaaggtaatccagatggaatacctttagccgtgaaggagttgtgacagaaggaaatgaagtaaacaaaggtgtaggtgcagctgatttgtcattttgggggccaagaaatgaaatgctttccaatttaatttttcttctcattgaaggcaaaagtagttatctactgaaagtgagaaggggtggtaaagtagtatttttgctaagtggaaagggttgaaaatcattactgtgaagagtaggagagagaatggccttgaagaataaagaaagattgctgattaaaaacagatgtttaaggtggtgacaacataccagtggtgccttctgcatagctgtgtaatttggggtattcactcaggcacctcactttcagctgagattggaatcctgagggttggtatagagaaggtgactaacagttggtttattcaaggttgctgtttgctcactagacatgacagaagaaatatgggacaagtgtgttgaagttggcaagaaaatggccgaagagattaaccatgaagtctagaccaggagttggcagactatagcctataggccaaatctggcccaccacctgtgttggttgtttttggtgattttggtttttttttcccccttacattttagatgtttaaatacctacataatatccataatatgtctcttagcccacataacctattaataaaaatacttactatttgacacttcaggaaaaagtttgctgaccccttatctagactaaaataggattataataaaatgggatgggactaacaggcagagaatagacgggtcaagggccttaaagtctcggtaagatccaaatattaggtatattggaagcaactgagcgagagacctgggaaggatagaggttgtggtgagataggattgtgagttgaagacttcagatctggggcagctgtgagtgaccccaggtctagctgtggccacagtagtgggtagctggagcagagatgggcctgtccgtggagttaagggcaaggaactaacagcctgagtggagacagtcaagttgcccaggggctggaggaagggaaggctgatggccggccattcacatttccaatttgggataggagagttaatataaataacaatcaaatatattcaatccttaaacgtgagggaaacctgactggaaggctgatcattaatttttttttttaagacctggagccacagtgtggaaggggttgctagtgaatagggaggcttgtgcgtgttaggtagcattagtaaatggtaccaaccacgtaaagcagagccaccagcacttgggacattgaaccaaaaccaatcttcgacgcttccagctgccttactggcgattcatttagaagaacgtggctttcctttgttactgtagtttttgaaggcagaactagcatgagtttgtggatacagacttcagccttccttcagtgttccatgcacataatcagaatgaccttccttcatcgccgcaggttattcttacagctggatggcagggtcgttgaagaagaacttcctcatgagtgaccttcaagtcctttctaatccagattctgtgataatacaagtatgatgcaattttcactaaaagctaaaaaaaaaagcccatctaatcagagatgatcttcacctctaatttcttgtttattgtcaagtaatacctctgttgcaggcactttatagggctacaaaaatgagtggtccccgttgatattgtgctgttatccgtatcttctttagccattatttcttcatatgtgagaaagtagtagcctcagttttactttaaaaaaaaattttttttttaaatttagagtctkgctatgttgctcagactgatctcgaactcctgagctcaagtgatcctccttctcagcttcctgagtagctgggactataataggctttgtgccaccatgcccagcttacttttttctatttctgctttattttatcctcatgtctggaccatagatagatcattgttatccaccagcaagaatgtgtcatggcataaaacagtcaagaaatctaagtgaaaccttgactgggctgtctttgggcttgtgcggtaatgcctcacatgcagtgaactctcaacaaatggcttttaaattgaattggaatcttccatttctatattagcacattttgtacctttaggaaaaacttgattttaatgtgttgttttcgtatgtgtttgcttgtttcttgagtagctgatggatttacaactgagtgacagtaactttcgtcgacacatcctgttgcagtatctcattttattccaatatctcaaggggcaggtcaaattcaaaaggtaagataatatgggtagtaaacaatttgtaaacagtagccaagaaaaaaaaggacttgcttacgatttttcttatgtatgtgtccatttcatgttaaggctgtatccctaaaacacatgtattgcagctgatacattgaaggcttttcgatattaggatatttaaggaaaagatgttaaatatatctgtcagtgtgagtttttcctgcccaactccagggcttgccaggagttgtcgtctttattagcaggtggaggtctctgctccaaaattccgtcattcccttctcacctccctcagacctcctccaaagcygatttgcagactaagccagtaatacatatctcacaaggtgtggagctctgcaggacattcaagctaaaagatgcaaagaaaatttttaagcaaaaaggagttcatttatttggggtttcacaaaacctcattaggctctctactgtctatctaaatacttccatccatttcctcctatcctgtccataactgaaggtggagcccactgttacttaacggtatttgtgttaaggacactgagcaatgccgtattagttgtataatgacttcactacctgctgggtttgaatcccaggctcgtcatttgctggctgcagtgcagctctttcagacttgtaattttaaggtagtagcacatggtaaacactcaaaaaatgttatttcttatccttctatctattttggaggtttggtatagcatagtaggaagatgagggactttgaagtgagacgtgggtttgaattaaatctttatggccttgggcaaatcagtgagacayggtagtctctgtttaatatgtacatgtacttgttccgagaattcaatgaataatgtatgtaaagtgttcagatcctagccatcaatatttattggatgtctttaaatcacctagtgcattatgagagctcagttagtggcagctattaacaatttgggtttgcctgttgccttttctagggtttgggtgttttattcgttgtattttgaatgaatcttaatgtagcatgccatactgaatgtgcatcatgtatacacatatcttaatatcaaatcagaagttttcgtttcacactcagcttattttaggaaacatatattgctctgttcatagtgaatctgattgattaattgaatgttttattccctgcatatgcttttatgtcttcagtaccaaccctcttgaggaagaagtgcaagaattttctcttataatcctctcatttgtgattattcttgtcttggtaatttttgacactatccacagtatagttacatgttacatgccttgtgttttttaaaccttaaagttgcatatgcattgctgtaactcaagcatgctttcattgctttgttccctagttcaaactatgttttaactgatgagcaatcactttggattgaagatactacaaaatcagtttatcaagtaagttcaacacgcaacaaacccatgattgaaaaaatggaaatttaggattttctttgtttcagccccaaataggaaaataaggataaagttaagctcaggtacaagaccacaaacactccttggttctctgcctacaaaccactcctatgatgcagaaagttgttgaaagcttagtatattctttctaatcacagctactatctgaaaacccccccgatggagaaagattttcaaagatggtagaggtatgtgwtttttatgcttacatcctcttcttagcacraaatagaacttcagaggattccactaaccaaaatgtaatcgctttgtttttcccagcatatattaaacactgaagaaaactggaactcgtggaaaaatgaaggttgcccaagttttgtgaaagaaaggtaaatacatactgaaagaaaggtaaatacatactcatcacaagaacracgagaaaggcttttgaaaatgtgctccgatatgattatagcatgtaaaaatacatgtatatatttcacataaaaaatgtaagttgaactttgtaagagtacaaccactttgatttacctctgtattttttaaacctcataaatttcttgtcattaaattcctggaacaaacatcttattattgagaagaatactgtatatctactccgtgtaatttgccatataatgtggcatttttatcttatatctgataattgttctatcataatatgaagttttmattttttttttttttttgagagggagtctcactctgtcacccaggctggagtgcagtggcatgatcttggctcaccgcagcctccgcctcttgggttcaagcgattctcatgcctcagcctcctgagttgctgggattacaggcgcctaccaccatgcctggctaatttttgtatttttagtagagacaggctttcaccatgttggccaggctggtctcaaactcctgacctcaggtgatccacctacctcagcctcccaaagtgctgggattacaggcatgagccaccatgcccagccagttttcatcttttttaagaggaaaacaataactaaattttcttttacgttaaacattcttctatttctgttatccatttgtaattcaaaaaatagtgtatgttttgttcacgacagaacatcagataccaaacctacgagaataattcggaagagaacagcacccgaggacttcctagggaaaggacccaccaaaaaaattctgatgggaaagtaggtgaatttgtcttcatgtgggatgttcttagttatttttatattttgaagatgttactttaagaactctccatccaaaatatagtatgagattgtgtttggtacacacatagatagccaaagcaaaccgcactgtctatactgcccattgtgtgggttcatgcaccagataaaccttcattttgtctccagcttccaaaatctgtgtctctaggctgtgccattttttccgtttcagacagtagaattgtttagattccagttgttgcaaggtaccataatccttgagttctcttaccttccagttaactattcattgctttatattgtgctggaatatttttagaaaaaactaaagattatatcattatcattagtcatgattaatgattatatgctcatatagagaataattttaggtattttaaataccaaaaattattgagaaaagtaaaactcatactgtcaacatccccaaatccactgtttacattgtattgtttttctgttcagtttcaaggcacatgaggatggtgtccataaaaaatgtatttatttctgtgtctattttgtagtgaggagttaacaaggctttggaatctttgccctgataatatggaagcctgtaaatcagagacaaggcaagttgaacatttttcaaatgaagtgttgcttttgtcaagtgttgagtagaatggagccttttctcagctatgatcagagctcaaatgaaatttaaaagtttattgtggttgacttttggcacagcagcgtgtaacttcccaccataaaactcctcaaagtgctgataaaataattttagaaatcacaaaaaaataaagattcacaaaaggaatcaaaactacaaacagaagagtaagcctatgaactratacggttctagggcagcagtactaatgattgccagctttgagaaccagggaacttgggttttaatagtcacaaaagttcgttgaacttgcaaaatgggcaagtttaatagcagtctagacataggtaaagtaagaattaatgggttaattaatgattaagaaatcacccagaaagcaatacagaaggagcagagttagaaacgatgacttaatgatagttgaggaggtccagcaaacatctgatggcagaaagaaataatagagaatgggaaagaggcaataattgagttaattattaagaataggcatgaattcataggttcaagaagtataatacttaaggaggataaaccaaataaatccatatctctgtacatgataataaagtcaccagagagaaaaaacagacaacctacaaaggagcaaagttaaactaacagttgacttcaagaacaacaaaaatcagaagacagtgggatgagtgcttgaaaatgtctttcmcattctctattatttctttctgccatyagatgtttgctggacctcctcaactatcattaastcatcgtttccaactcttgctccttctgtattgctttctgggtgatttcttaatcattaatccagtaattcttactttccctatgtccagactgctgttaaacctgctcgttttgtaaattcaatgactatattttctcatttctagaagtattacttgctttttcaacatttcaactaaaaaattctgtaacaagttaaacagttgtggttgagtgattgactaaaactatgagaaattatcaacagtccccagtaaaaaagctgtcttaaggaaactgaacccagaaaggagtaaattgcagaaaggattactgtgtagacactttggtaaacatgaagaaatctgaataaatcttatcaagaattcactgttataaaatagtaataattattatttagggttattttaaaaggtaaacttgataaaagtgacatgtaagacaagaaggggtggtcagaattaaagaatgttatggtttaagtcaaacatgcttgtaaagtatgtgaaagaaatggaatatgtaatttttaaataaattgaggggtaaaagtaaatacagaaaatttaagcaagtaaattagaaggtaggagaggaggaaaaaagcacagaaaacacaacagaaagtacaaaacagtatggttaaattcaaatataaatggaaatggactttctggctcaaagacagaaattggtgttatattttaaagatctatcggccaggcgcggtggctcatacctgtaatcccagcactttgggaggccaaggcgggcggatcatgaggtcaggagatagagaccatcgtggctaacacggtgaaaccccgtctctactaaaaatacaaaaaattagccaagtgtggtggcaggcgcctgtagtctcagctacttgggaggctgaggcaggagaatggcgtgaacctgggaggcggagcttgcagtgagtcgagattgcaccactgcactccagcctgggcracagagcgagactccgtctcaaaaaaaaaaaaaaaaaaaagatccatctatatgtttataagaaatataccttaaaaataaagatatggaaaggttgaaactgaaagaacttttaaaagacgtaatttttaaaaggcatagttatattgatatcaggcagaaaaggcttaaaagcagaaagcattattaaaaataaaggcaatcattgcataaagataaaaggaaaaaatagaaatatacacattttaaactttattttctaagaatgtgttctcaaaaatttgacaaaattagaatgagaagttgacccagggtcagttttcaccatccaccaccacccagaaaacctaccatctagtaggattttgacagacctttctcagaatttaataaatttggtggaaaaaacttagtgtaatacatttagaatttaacaaaataattaacaggcttggtcttacagaaaccacaagtttttgtaaattatgtgtgaatagcaaaagcaaaaatacttamaactcctttaaacacacttctaaataacmcttgaatcaaagaagtcataatggaaattggaaaatgtagagctaaataataatgaaaacactacatgttcagacttttgagatctaactcagtagaacacagaagagaaatgtatagccttaagtgtttacactttcaaaaagaatgaaatctaaaaaccaagctaataagagtctgacactgagagtcattcagaagaaaagtaaactcatagaagtagaaagtaaaataagattagaaatcagtaaaatagacaacaaacaatagagaagataacaaaatcaaaagagaagatcaataaaaacaaaaaccaggaaaaatagataaaattctaacatgattgattcctgccaaatctgtgagagtgaatcaacccagtagaaaaatgtacaaatgaatagtcagattcagaagtagaaaccttaataaacctctgagaagayggggaacttcactagtaactggaagtacagttaaaaactacagcaagcagtttccagctaagagattcagtaatttaaaaatacccagattttataagaattatggataaaaataatttgccagtgctgctggtaggagtctgatggcacagtcactctatctgaatgttaaagatgtctgtgccccactagtaggtgtgttgatcagaatagtgtttttaaaaactaagtttgagaatcattggtggtttgtaaagtcaatttagtaatttcaactagcattttttaaatgaaataggaaatatacttttgtgaagcattagctttacttatatatatctgtacatatacttgcatatatgtgtgtactgggttgcagtgtaaaatgaatttcttattgtgggttgcagtggaagtttgaaggcccagtgcctaaagaaatcagttcatctacaaggagacaggtgcaagaatgttcatttaacattgtcagagcaaagagtgggaagacaaatatctctgtgtaggacatggataacttggggcatgttcataaaatggaatatagtatctgtagcattagaaaatgaatggatattgggatagttttcttaaaagagcccattttcctagttttactctagaagatgtcttctgatcctgagacctcatttctttgcttgaccctgtatcaaaattttatttctaaaaacaaattcaagaaagatgcattttaaaaatcaaccatgctaccatggtaacaatttaaataagagctaaaggttaaacccttgaaatcgtattatggtctgattattagttttggtttaattctggtttaaagaaaaaataattcgtggatagggacttaatgtaaaagtttatttgctggtaaaattcaaatgctataaaataccctggctgccctctttgaatagcaacatatttatatattatagtgtgtaattaaagtatataatattatatgtagtaaatactatgtaatatttagtattagactatcccctttatttattgtcctttttgaatttagttttgacggttttacttccttaaaagtctggagttcccacgtaatcaaaactgtaactaaaagtatggggccattagaatcttgtcctgccaccactttatgagtatttattattaagagtatatgccatcctcactggttattttgtaccgctcagggaacacatgcccacaatcttgtcctgccaccactttatgagtatttattattaagagtatatgccatcctcactggttatttttgtaccgctcagggaacacatgcccacaatcttgtcctgccaccactttatgagtatttattattaagagtatatgccatcctcactggttattttgtaccgctcagggaacacatgcccacaatcttgtcctgccaccactttatgagtatttattattaagagtatatgccatcctcactggttattttgtaccgctcagggaacacatgcccacaatcttgtcctgccaccactttatgagtatttattattaagagtatatgccatcctcactggttatttttgtacygctcagggaacacatgcccacaatcttgtcctgccaccacttyatgagtatttattattaagaatatatgccatcctcactggttatttttgtaccgctcagggaacacatgcccactttggaggaattctttgaagaagccattgaacaggcagaccctgaaaatatggtggaaaatgaatataagtaagtatgctcctcattagctccttttaattttcttcaatttgtttcttccttaggaattgtgtgtatactagaaagcctcttaagagaggcagtagatagaatagtgctttttctcttaggtgagtttatgttcyaagttcttgttagtacacatcctgatttcaaggattattcctgttaactaagcrtgacttggaatcacccttgtttcaaaatataagaaaaaaaaaactccccctgatccccatttctctccaactattagttctgttctctctacccttcaaagcacagtatctcacagcagctgttaacctatcctgttccccttaatgttttcttctcttggcgtccatgagaatccaaatccatggttcttctgtttgcccttkgccctcgttgcccactccacctcacattccatttcagcctcctcatcctctgcctaactcaaattttggagtaacatcaggaatkggtcttagcctctttatctagaaccttctgggtgacaccrcagtctcatggctttaaataggaattgaagagtagtggtttaaaggcmagaggcctctggtcagaatgcataggttcgatyccctctaccacttacttactaggcaactaaggctaatttaatwattaaaccgccagttccctttcctcatctgttaaatagtaacagtacccatttcacagggttattctgaggattaaataagacagtgcactttgaaccctacagggcatgtggttagcactcagtatttgtgactagtgtgaccctgtgaccagagttgttaattactgtgacctcttaactaatctctctagttgtggtcagtgctccatgcatcagccagtgatctttaaaataattgtccaagtctaatctgcttaaaatctcccagtgagtgcctattccaaactccttcccagggcctaaaagacctccttggtctggctcatactctcctgtgtggccatgcctcccctctgctttaaccacagcaggcytcttggtcctgtctttccctttcctgtcaggaccttcacactttactgtctcacttgcttgaaccactttttccccaaggttgccgtggcttaaagtccccctggctgggaagctcttcccctccctggtctcctcttttgcattctcgtggtttttatttcacggcacttaccactatccaaatgagaaggtggcacttaccactttctcatttctcaagttttcctcatccttatgaaattgtcttataccttgtgtgtttatcactagcaatgcctgccttactgtgcctcaggtactctccacagctactgagtgcctggctcaaaagtgtttgtcgattgaaagaatattaatttatcactgttacataagactaggtggactcattcctaaagtgatagttcaaattattatctccaaagagggttttgtggagaataagaaaaatgatgtgtataattgacagtgaattttgaaaatgcytaaaataatcaaattgtctaaacagatatgtcagagaggaaggctcttaactgtttaggcaaagcctcacagcaggtgttaacttgggaagagtccccagtgtctatgggtagtttttgttaagtcttcagtggtacctgcacatcctaaaggtaacatatgcttatttataagaggtgaccaaataaaccaaattgctattcttaggggaggaagagacttccaatccaaaactcttaaatggaataaatttgtggtttggtttcttccgcagcattgcatatttctgacgcattatctttagaatttctctgcagtttgtttctcacctgatggtataccaccctgatcattgttatacttcattagggaacagttcatggattccaaatagctagatggatgattcctgttgtatacrtactgcatccagccagtactgcacacacttgttgacttgttaaaattaaacaaaatgaacggaaactttgaaaatgtgtttgctgcatatgagcctgcctcttcaggcattgttggttcctgtgattagttacatgtgcatctattggtttgttattatcagtggactacatactgaaaagttctttaggaataagattcaaatacaaagaatggcactttgagctatttaccttaaatacagaattacacatggcagaactgagcagaagggaatacagaaatacaaagctataaattacaagcctgacacctctttttatagggctgtgaacaattcaaattatggttggagagccctgagactattagcacggagaagccctcacttcttccagccaaccaaccagcagtttaaaagtttaccagaatatcttgaaaatatggtaataaagctagccaaggaattaccggtaagtaccatagatcaacttttcataccctttagttgacatcttctttaaaattgctgtcactatgtgagcaaaaaactgacttaatcatgtgaaaaaccagtgatccacaagctcccatgttttagaatgagggaaaaacacattggaatatacatttacaggaaatacatgagttgataaagaagtaactgataattttctgtacagcatgtaatttaaagttcaacagggctgtgggtgcggtggctcacgactgtaatcccagcactttgggaggccgaggcgggtggatcatgaggtcaagagattgagaccatcctggccaatatggtgaaaccccgtctctactaaaatataaaaaattagccaggtgtggtggcacgtgcctgtagtcccagctactcaagaggctgaggcaagggaattgcttgaacctgggaggcggaggttgcagtgagccgagatctcgccactgcactccagcctggcaaccaagcaagactccgtctcaaaaaattaaagttcgtgatacttcaggtaaactgttatgcacctatacacacagacatgaattttttcctgtttgccaatgcattatattgtcttttatcaaagataaaagataagaatcagaaacttttaaggacactgttgctactggcttccttgaggccgtctttactaaataaaccctgggtatttgcaaatcctggaactgtgctttttactgacttcctgcttcccagattgggggtggggagtctttccaactctgaggtcttcccaagttcactccttctgcaggtgaagatagtcccacttaggatccttacctgacactgtcatttaacgctctcaggggtgaggttctggcaccctgtacttggaatctcacaaccgtccttatccaaacaaaatacctgttaccttacttcagaggctggcattctttcaaacattcttctttctcatttttagcctccttctgaagaaataaaaacaggtgaggatgaagatgaggaagataatgatgctctactgaaggaaaatgaaagtaagaactgaattttcttggttatttaacaaaattgaagacgattggggttctttgttgataggtacattatttaatttgatsgacttctcaacttctcccattttatctcaactgtttctgacatagwgaggaatttaaaacattgcttaataataactttaaaaacactacattttatgcaataaaattgggaagtaatggtgctttaaaagggaatgaaaatacatttgaaggcgacccatacctctgttaattattggttattggagggggagcacctcatttcagggaaagcctacgtaattataggtaacagctttagctttgattattgaccatgcttattaagagtggtattcaacttacggagaatataaaaaataattgtttacttttaaaataaagtctactaaaggtggttaataaaacttattggccccatagctttccatttctgttgtatactyagaattgcgcataatttatattctcttcattttctaggtcctgatgttcggcgagacaaacctgtaacaggagaacaaatagaggtatttgccaacaagctgggtgaacaatggaagattctggctccctacttggaaatgaaagactcagaaattaggcagattgagtgtgacagtgaagacatgaagatgagagctaagcagctcctggttgcctggcaagatcaagagggagttcatgcaacacctgagaatctgattaatgcactgaataagtctggattaagtgaccttgcagaaagtctaactaatgacmatgagacaaatagttagcttcttttttttttctttttattaaaactgtgatagattttgttaccaagcagcatttgataagaggtccactggttttggtaaacaataaacatttttataacaattgttgtacagtcggctggtgctctgagaacaayagaacacatattggctcaaaccagagtttggggaggttgggttgagataatgacctaaacgaagtgacctcaagatcacaaaatatatttttttgttaagtagatgtatttataatgaagttaaataagcactatttagggatatgtcgtttcttataccaaattagtttcctgtgtgttgtttgttastagttttacaaaatttatcctgaaatcccagaataacactttctgaaaccatatgactgctctgttctcacttattcgtgctttcaagcagaggatcaacaaatgatggtttgttctgcctgccacgagtcttgatcattaaaattgtactggcacccagctgtgctcactcataactaactaactaactgtctatggctccagctacactataacaacagcaaagctaaggagctgcagcactttatagcctgcaaagcctgaaataatttacwatcaatchtcaatcaatcatcatctatctatctatctatctatctaatctatctatcttgtccattacagaaaatgtttgtttgccaactttaaaagaaatgaagtctaaaacctcacttttccttctagccttacaaaaattgcctgacctctcaagacttttaatcacttcagggattcttgtgacattcaaytgagatatatgtgaacacaccctatacacagcaaagcactargtagtagtagcagaagacagtaccaccgacttttcttgttcccacataagcatttccctttagggctctaagatgaggtcatcatcgtttttaatcctgaagaagggctactgagtgagtgcagattattcggtaaacactcttaggcctaacctagctagtcagtcaagcagtaatctagcacaactctaatgttgagatgatggcctcggtgtgagtggcacagcatataaggcacattcaggaatcaagacttttttttttttggcctactcctctcccttctcaaagaccttacaggcaaggctgaattctaaaatagccttattagttaaaaacaacactggtataactaactcccatttctacttgaaaaaattctttggaataatgcttttttagatcaaataaaaaaatcaagctttttataatgatgataaggaattaattacaatttttaaaattctaatatagtccatacaaggcttatatactttgctctaaacctagctcacctggtctagtagctacaacatttagtagctacagtcagaaaatctaaattctaattgttaaattcatgtcctcaataaaattgttctgaccaaatgagacaatgaataaaaaagactttgcaaagttacaagcatcatacaaawatacatgaatcattataattttcatggtctcatcctgcccattctattcttaatcccctccacaaagtagaaagtattgattgccaagtcaaagtttaggtgaggaagctatttacaaataagtttccctgcaatgcttattttatcccctcctagtgttcacagattgcatcacatcagatttgaaagtaaaatggctgttattttctatttttaatagttatcatcagtgttgtgctctgccgagcattaaaacaacatacacaaagatatgagatgttatgataatccccaaactttattataaataactcaaaatcagagccaaactggctggtattctatgctttatcctttccctagcatcagkcaagggtcctggaacaaagatgagtaactattaaaatgtaagaagcctatcatattgaaatacctcatatgcttggtattttctactatcactttaaaatcactaaaattctgaaacagacattaagatttgggaattttttctttttttttttgagacagagtctctctgtcacccaggctggagtgcagtggtgtgatctcagctcactgcaacttctgccttccaggttcaagcaattctcccacctcagcctcccaagtagctgggatcacaggtgtgcaccaccacatccagctaatttttatatctttagtagagacagggtttcaccatgtggccaggctggtctcgaactcaacctccagtgaaccacctgcctcagcctcccaaagtgctgggattacaggcgtgagccaccgtgcccagccaagatttggggaattaagaaaggaaatacaaacacaactgagccaaggaaagaatctgactgataacatcactgcattcagcatccaaagaaatccattacttttacaactttgtatttctttttaaaatacaggcaggcaaagaagataacaaatatttttaaatggatgcttaacagcacagtgttaataaccatcttcagaaattgtacagtattaaacatgtcttcagccaagctccaacactcagaagacaaaagacttgaggtcaaaagctattaatccctttttttttattattattaaatgtcctcattttctaaaaataagcaaccagagcttgtcaacattttcttaagactgattattacaaagccattccaaagttaaatgtacaatccacagtacatcagagagagacacaataataaatgtataatcaaaggtactattattgatyacaatttattttaaagtcaggaaaagcctgcaataggctggacaaatacttgattgtgcccatgtttccatgggatggacagcagcactgagtcacacaatgagagcaacacttccttttccaccttcctggaaaaatgtttgttagataaggcaaaggatgggtggctacagaatggtggtttgaaccatgcaagaacagcaaataataggtaataggtgtgcagtaaacatctgactgctgaatcttgggtgaaaaaggcagcaagaaaaatgaccacagaaggaaatggttgaaaggcatttcaactctgaactttttaaaataatgcaagaaataataagctttttaaaaatgtctttctgccacctttatatagggcagcacaatccaaagataattttctcttctctgtaattttttaggttggtgcacagagtggtctgcttctgtcctcttttgttccaaatgaggtgaaacataaacccacctatgtgtcttcctctaaagctctggattatagaaatgatcaacaaataacatttattttcacatctaagcataaatactaaaatgaagattactgttcactttcctcttccattatttcaactctgcgaggcccatagagtagaacgtaagcgatatgccagtctccaccaccagaaagccgtaagatatcttctggtgttacgatgctgactttgtcatcatcaaacttaatccattcatctaaataacagggacaagaagatgaattaatgttatgcaggattcgtctcagagttccactgcaaaaaaagtatcaagtcatcggaggcacagcagtgctccactggccacaccaacagtcctccaagtgcgacccagtgaccacacaggcttaagggcactgcaggggttccaccaggttacaactacttcaatgacaccactagagcactgcttgccttttccacccacattctctcaagtgtactctggaattttccagaggctacataatgtatgataatgcaacagactgaatgcgaacactaacaggagaacccagctgcctcctatttaagccagacaacagaaagacataaaaatgtaaatcagtaccatttctcactcattttgtttttacattaatatgtaatgggcttattactatcatttttaaaactaactttcttaatttctcagttttaatttctaatacagtaagtattaagagaggcaaacctcataaaccaaagctctttggggcttcaagaatgtaaagtggttctgagacccaaagtttgaaaaccacactgctataaaatttataataaatgaactgttaaaataatattgaacagttgaaaaaagaataccctttaccttgtttccttttcacccatgatacataatgacctgaagaactagaccttccctggtgtgttagtactgcttgtaagtcatagtatccacaattaytggagccaatatctaaagaaagatgtaaatccattaatattagacaatgaatagacatgtgccttctcaagctaagtaacaagaataactctaaagttcacattacgaaagtattatcagaatccaataagatactactgtccaatcatagttaaggcttcatgattgatgttttaataagtaacttactcatagaactgtatgccaatgagtaaatttactatatgtcattaaggtaaattgttcaagaaacctgacattttgtttgaaaagcacatcagaataagtaaatatggggtaagatgtaaattttaccttaaaaagacccacatacaataactcaattaaaatgagaatgttacttaccatcagcaaaagaaaagggttcatacttaacttctttctggggactactctttttgtcactctgaggagaaaaaaatgtttaattttaaatcatgattttggaaataaaatttgaattctctgtaagtgttcaatttcataaatatttactgtctacagtgcacagagacaaaatacagtctaccttccaaattactaaaatgatataaccacagttaaaactgtaaacccagcagtcctacacttcaacaatataaaatcttgttacagtacagtaacagacaccctgaatgtgatgaccaattttaaaccattaaagtgaaagcgtaccagtgaatacagcagtacagttaaacagtgctctagggcagaaaaggaaaaacccaattccccagtgttaccaaaatactgtcaaaccacagaggtggggggaaaaaacaactacctctaaaacaagaattcctgcaatttgtattaaacctcctgagccatgtccacttaccacgccagcacaaatgaactgaaatatttttcagcaaagacttacctacattaaagaggtatgatttaaattagacaaggactcttaggaggaactcacygcttcaactcattttagcatgcaacatgagaaaaataacttatctaggaatacagcacaaagttctttaaaactataatggtaatgaagacaatgccagcagcttacaggtagctgtgatggcaagaagtcaaaggattccacaacaaaaaatggcaactaggttaatcacatcttttttatacagataatgaaatcacctacagcaatcactgaaaaaactatacaaagaaacacatttaaaaacataaagtaaaacaggattctaaaacacagttcaagtaacccacaagaagacaaaaaaaaaaaggcaaaacatcaaaaaagcagaattaaaccctaacatgtcgatgattgcactaaatgtaaatagtctatacctaaatcacatttaaatttaatataatttaggccgggtatagtggcttacgccggggcgagtggatcacttgagatcaggagctcgagaccagcctggccaacatgatgaaaccctgtgtctaataaaaatacaaaaattagccaggcatggtggcactcgcctgtaatcccagctactcgggacgctgaggcaygagaattgcttgaacccaggaggcagaggttgcactgagccgggatcgtacctatgcactccagcctgggcgacagagcaagactcagtctcaaataaataaataaatgtaatagaatttaaatcaagtaagtgtgttctgtcaccacaatggcatcaaactagaatcaacagaaacataacaggaaaattacttagacccttctaaataaccaatggccaaagaggaagtctcaagataaatttttaaaaatacaaggaacagaatgaaaataaaaataccatgtatcaaaattcataggatatagtgaaatcactgctgaaagggaaatttatatcacaaggcaagcagaataaaggaaataagagcagaaatcaatacaactaaaaacagaaaatagagaaaaatccatgaaacaaagccaattctttgaagatatcaataaaattaataatcctcaagcaagggggacaaacacaaattactaatatcagcaatgaaacgggatggatctcactcactaaacactctacagacatcaaaagggtaataaatactagaaacaattctacatacaaatttgataagcttatgaaatggatcaattctgggaaaacaatttacaaaaacaaatacaatatgaaatagatcatttgaatagccctatatctatgaaggaaattaaatttgaaatgtaaaaactcctgaaaatgtgcctgcctatgtttaggcaatagaaaaaaaataaataaaaataaaataaaataaaataaacaaataaaactcctgaaagtaaaatctctaagcagactgttccaccaattctatcaaatgtttaaaaaaaaattaacaccaattctacataatctcttcaaaacactaatggataaaaacagctaataaattcagcaaagtcaaggatttaagatccatatacaaagttaattttatttctatatgctagctttactagccactctagacaatgaaattaagaaaggaatgccatttacaaaagcatcaaaaagaataaactatttaggaataaatttaaccaaaaatgtccaaggcttgtacactgaaaactataaaacattatgaaaaaaattaaagacctaaatgaatagaaagacacatgaagtttatggattgtaagacttaatactttttattttttgagacacagtcttactcagtcactcagactggagtgcagtggcaccattttggctcactatgacctccatttcccatgctcaagtgatcctcccaccttagccttctgaacagctgggactacaggcacacgccaccacgcctggctaatttctgtattttttgtggagacagggttttgccatgttgcccaggctggtctccaacttctggactcaagcaatctgcccaccttggcctcccaaagtgctgagattagtcttaatactattaagatagtaatactttttaattgatccacagattccgtgtaatccccgtcaatcttttttgaagaaatggacaagctgatcctaaaatatacatggaaatgcaagggactcagaatagctaaaataactttcaaaaagaagaacaaaagtgaaggctgatacttcacaatttcaagccttattagaaaactacagtaatcaagtcagtctggtatgagcatcaggacagacatatagaccaatggaataaaattaatagtctagaaatacactcataaatacagatggtcaaattaatctctacaaaggttccaagaccatctgatgggcaaagaacagtcttcttaaaaaatggtgctgagacaaccagatattcacatgcaaaacaatgaatctgaacccacacctcacactatataaaaagttaaccctcaatggatcaaagacctaaatggaagaactaaaaccacagaactctcagaaaaaaacatacgtataaatctctgagggcatggactgggcaatgttgcccagactggagggcagtggcgtgatctcagctcactacaacctctgcctccccagttcaagcgattctcctgcctcagcctcccaagtagctgggattataggtccgcaccaccatacccagctaattttttgtatttttagtagagacagggtttcaccatgtttgccaggctggtctcgaacccctgacctcaagtgatctgcctgtctcagcctcctaaagtgctgggattacaggtgagagccaccatgccgagcccggcaatgctttcttagatatgacaccaatagcacaagcaactaaagaaaaaaatagactggatttcataaaaattaaaaaaacctttcttctgcaaaagaccctaggttaagaggatgaaaacataagctacagactaggagaaaatattcacaaaccacatatccaacaaaggtctagaatatggagaactctcaaaattcaagagtaaaaaaacagtacaattagaaaatagggaaaagacaagaggaagcattttacaaaagaggatatacagatagcaaataaacacatgaagacatgctcaacttcatcagccactaggaaggtgcaaaggaaaacacagtatcactataaacctatccaatggctgaaatgaaaaatagtgacaacaccaaatgctggtgagaatgcagagaaagtgaatcagtctcaccttgctggtggaaatgtaaaatggtacagccactctagaaaacatctggcagtttcctgaaaaactaaacatgcaactaccatgcaatctaacaactgcattcctaggcattcattccagagaaatggaacttacgtttacattaaaacctgtacacgaatgtttacagcaggtttattcatcacagacaaacactagaaacaacccaggtgttcttcaataggtgaatggtgaagcagattgtggtaaattcacaccagggaatactgatcagcaatgaaatggaaggagcaactgatatgcacaacaccctggatgagtcgccagagaattatgctgagtgagaaaggttatattaaaaagtggaagagtttttatttcgtttgtataatttttttttagaaacagagtcttgctttgttatacaggttggagtgctgtggcacaatcatggctcattacagcatttaactcttggtctcaagcgatcctctcatctcagcctcccaagtagctagaactaccggtgtatgccaccacatccaactgattttttttattttcatattttgtagagacagggtttcactacgttgcccaggacagtctcgaactcctggcctaaagtgatcctcctgcctcagattcccaaagtcctgggattactagcgtgagccaccatgcctggccaactttcttgaaatgacaaaaattatagaaatgaacgggttggtagttgtcaggaattaaggaaggggtagggcagaagaaaagtggccctgtggcaataatgcaagatctttgtggtgatggaaatgtactgtattttgactgcatc

SEQ ID NO: 95731 - DNA, 67982 bp, Homo sapiens
ctacatttatggtaatttgttcttcagtcaaagaaaactaaggcagatatgagaaacttggcaaaggaaaattgtttagtctagttgtccatactactataatgaataaaatgtaaattcactttaagactgttcctggtcaggtggtggctcacacctgtaatctcaacactttgggaggctgaggcaggtggatcacttgagcccaggagtttaagaccagcctgggcaacatggcaaaaccccatctctaacgaaaaaatacaaaaattgccaggcatggtggtgcacacctgtagtcccagctactagggaagctgaggtggatggcttgagcccaggagacagagactgcagtgagccatgatcatgccactgcactctagcctgggtgagccagactctgtctcaaaaaaaaaaaaaaaaagactgtcccgaatccaggaaaggttttaatcatgatgcattttcctcaccagaagtccaaaaacatgtatcaaaattgcctgatgtagtgactaccattatttaatacatgtgagtgccttccaccttgaattcccttattattagccacacacataggggggcacttagtaagtacatgtgttattggacagtctcactcccagagctgaagtaaaagtttctagatgatctatgcttgctcttcttgacatcccactaaaaataactgatctggtatgatccttaacatacattaggcaaaaaaacaaaaacaaaaacagatctgtcaaactgaaataaacttctttttttgagactgagtctcacactgttgcctgggctggagtgcaatggcgggatctcagctcactgcaacctctgcctcctgggttcacacgattctcctgcctcagcctcctgagtagctgggattacaggcatgcaccaccacacccagctaattttttctatttttagcagagtcagggtttcactgcactggccaggctggtctcgaactcctgacctcgtgatccacctgcctagacctcccaaagtgctggcattacaggcgtgagtcaccacgcctggccaaatatttcttatattggattaaccttggttatcctcaaatgagcaagagttagttttgaactaccccaaaggaatatagtgaggggatgaaggttctcctgaaccaccctgaccaccaggacaaaagcagccttacctttgcatctggcacctgagcaccaaggctgctgagtcccacgatggagtagaaggcagattccaaatttgtgaaagggcgatccagcgaggcttttagtctctccaygtcatgcttggtgaggtagtgagtgggcgtcagagcccaggtgctggctatgattgtcagggccaacaggaagacagtgcttgaaccttggggggaaacaaccattcagtacactctacactcttccaaggtgctatacacagtcccaatgatgatgcacaccaagatctgggaaccaaatcacatggggaagggcgagggaatccaggggtttaacctgaggagaagccttgggaaggcagggagcctgctcttcaactggtggaaggacagtcctcccagcagcctccaagcatctaaagcacaggccttatcctactattcccatctgaaagatgtctgtaagtcctctgcctctaaggacaaacccaatcctgaatcctcacaccttgccagcctctcaaccagatctcctccctcgcgcttcccgctatctgttgctctctggcttcttctctgtcctctaagaagccaggttctttcctgctcagcatttttccatgtttttacctcaacttggcttaatttttactttcagaattcagctcaagcacctcttccttaagcagctctccctaggattagttccccagtacaataatgtaaggaagaacccagactctggggccaggcttaaatcacacctctgccatttattagcaatgtgcccttggcagttattcaaccagctggtgcctcagtttcctcaagtgtaaagtgataatagtatctacctcaggtacaattacacgagttaatacagaaagatctggccaggccagcactttgggaggccgaggcaggtggatcacctgaggtcaggaatttgaggccagcctggccaacatggtgaaaccccgyctctactaaaaatacaaaaaaattagctgggtgtggtggcaggtgcctgtaatcccagctacttgggaggctgaggcaggagaatcgcttgaacctgggagacaagaggttgcagagagctgagaatgcgccattgttgccaacctgagtgacaagagcaaaactccgtctcaaaaaaaaaaaaatcttagaataatgactggcacataacaaatgctatatcaatgttagctactacttctactactattattattgttgtgcttatatccactcatagcaatctgtacttctctgtgggattttctacaactttaacagtgtaatgtctgatttctctgctaaactgtaagttccatgaggataaagactgcttcttttgttcatcccagtatttccaagtcttgcacactgcctggcacatagttactgaataaatatttgctgaataaatgaaaagaaaaattaatccccatctatgatgccccaggggacaggaagctgcaggagtggtacatttctacttcatttatttaaaaaaacaaaacaaaaaacacttttgaatgggctgcttcttgataaagtgcattgtctggcacccaagtaacagcagtaacaaataatcactaggctaacatgagtggccctaaatcctttgcctttagtgttaaattaagcttgaactagaatccttgaaaaaaggcactattggccagcggcactggctcacttctgtaatcccaacacttggggaggctgaggcaggyggatgcttgagcccaggagttcaagactagaccaggcgacatggcgaaaccctttctctacaaaaaagaaaatacaaaaattagccaggcatggtggcgtgtgcctgtagtcccagctactcgggaggcggaggtaggaggatcacttgagcccaggaggttgagactgcagtgagctgagatcacaccatggcactccaccctgggtgagaaagagagaccctgtctcaaaaaaataaaagacagctgggcacagtagctcacgcctgtaatcccagcactttgggaggccgaggtgggcggatcacttgaagtcaggagttcaagaccagcctggccaacatggtgaaaccctgtctctactaaaaagacaaaaattagccaggtgtgatggtgggtgcctgtaatccaaactacttgggaggctgaggcaggagaatcacttaaacccaggaggcggaagttgcagtgagccgagatcgcaccactgcactccagcctgggtgacagagtgagactccatctcaaaaaaataaaaataaataaataaaattaaattaaaaaaagaaaaaatctatcacgtggtgtattcatcaaatgtatactgagctactatgtgccacacactactttaggtgttaaaaatacagcaggaaacaaaagaaacaaaactcccaccctcaaagagcttctagtctagtgacaaaagacatcacatgaaataagaacattatttatcacattacaaagtaagtgctatggaaaaaaataaagtacagaagagatatttgggaagggctgcattttaaatacggtagtctatgaaggactaagaaataaacatattgagtacagatctgaagaagaagcaagtcataaagatatctggtgggaaactatgctaagaagaaaaacccaatatggccaggcgcagtggctcacacctctaaccccagcactttgggaggccaaggcagggggatcacctgaggtcgggagttcaagacaaacctggccaacatggtgaaaccccatgtctactaaaaatacaaaacatgagccggacatggtgacttggcctgtaatcccagctactagggaggctgaagcacgagaatcacttgatctgggaagcagagtgggcagtgagctgagatcgtgccactgcactccagcctggggctctgtctcaaaaaaaaaaaaaaaaaagaaaagaaaaaccaaatgcaaacattctgaatcaggagtatgtacacatacagtgttttttgagatcagcaaggacagtacagcttgagtggaataagcaaagggtaagaagtagatgaggtaacagaggtagcagaggacaaatccagagggccttgtataccaccgtagtggaagccactggaaagttcttttttttttttttagacagagtctcgctctgttgccaggctggagtgcagtggcgcgatctcggctcactgcagcctccgcctcccgggttcaagcgattctcctgcctcagcctcccaagtagctaggactacaggcacgtgccaccatgcccagctaatttttgtctttttagtagagacggggtttcaccatgttggccaggatggtcttgatctcttgacctcgtgatccgcccgcctcagcctcccaaagtgctgggattacaggcgtgagctaccgcacccggctggagaccactggaaagttctaagcagaggagtgatttgacttacactctaatggtattactgtgttgagaataaacaatactgtgtggagaacagaccatgcaggtgcaaggacagagcaggggacaccagttgggagactaccgccataatccaagccagaagatgatggtggcccaaaccagggcaacagcagtgaacatgatgagaagtgatgagagttagtctggctagaattcaaagtcaaagcctatcagaaactgctaatggacagaaagacctaagagagagcggagtcaagatactaatgctgaatccccaatgccttgtgcacaggcgggtacccaatatatgaagatctagtgaatggctgcgactagcattttcccacctagaccgtaaattcccctaaaacagcacctgtgtcagaatcctaatcttctcactccatgttaacgagagcagtaacttttctgactaaaagttgagcacttaatatgttaggtatgcccacgctatgctgtgctttgcacacaccaaatcattaaatcctcacaacatctaagcaaggtggctattttctgcatttcacagaccaggaaagtaaggctcagaagtagttacctgccctaggacacatcactgaaaatcaaacttcaggcaatttgaatccaaagtctgcttttaaccactttactatcctgaacttctcaaataatgaaacggtgagccactgactcattcatgtgtcaccctgggcaagtaagttcccttccgtgggattccaacttctcatctgtcaaatggtagtaacaagagtacatgcttccaaagttacgatgaggctacatgaaattccaccctgcacagcgtctactcagtaacttccaatgcagttaacttagttcttacctagggccatgcactgttctaaactaagcacgaagattatttcacttaataaagcaactcaacgaggcagataacgtgactaatttgactaacttattttacagatgagaaactgaggtgtagaggggttaagtaacctgctttgggttacacaatgaatacgtggccgactgcaagtttgcacctagagtgtcacttgagaacttatgctccaggctcccagagagaagtgagggttttctttgcccctttcactgaatgggaaactacagcacaaagaaggacaatctgcccaaaacctcacacggagtaaggggcagcgccgggaccagaaccttaggccgcctggcccagaagcccgcgcgagtgaaatgaatgaggccagacctaggctaagcgcgtccgcggtccccacggctgagcctcggggcgacccgtagctccgcgctgcacccctcccccaggcaccaaccccgccaggtcgcgggcactcccaccagctcgcagccctccttcggaccctcgatccgagagcgccccagccagagcttgtgcccatgcccctgtcccgcaggggaaggggatcccgcctggccggctctcgagcggcgactagtaacctcccgcgggcgacagccctctccccaaagccacgcgcaactcctcacccggcggcgccattcctccgagcaggtcccgccggagtccgagccgcgggctgasttccgctcgggaaagtggctccaagagcccgccacaggggacgccagggactcgcggcaggctctgcgggccaggatgagttctaagcacaggtcagtgtscgcggccccgctgagcttcgacgcttccagcagccgcggccgggatcccagtcctcccgctcacagggccttgcagttcccgaggacagacccgcctctcccccgcgcccaggcccacttggaaccgaccgtctcgcaacgctcctattccgggagctaccgggacgcggttgggccaggcctcggggtgggcccgagacggggccgcttctgattggcctgtctgctgtcactcactcgtctttctgctgcccggcccattttaaaggaacaggaagggtctcgtcgggaggggatagcttagaagggatttttttttcctctttagaaaattgtggcagtttctggccgggcgcagtggctcacgcctgtaatcccaraactttgggaggccgaggcgggcggattacctgaggtgaggagttcgagatcagcctgggcaacacggtgaaaccccgtctcwactaaaaatacaaaattagccgggcgtgktcacacatgcctgtaatcccagctactcgggagcctgaggcaggagaatcgcttggacctgggaggcggaggatgcggtgagccaagatcgcgccattgcactccagcctgggcaacgagtaaatctccgtctcaccaaaaaaaaaagaaaaagaaaattatgtcagttttttccaaagattatcagtggggttgttaataactgacctacgagtgacgttttatctgatttgcagagcaatgcagtgactcatagagaacatattaggccagttttacaggctcaacatggaggtggctcatccaggaacaccgctctaataactagcgccaactactgaatgtttacagtataacccgacactgtgccgaacgctctacaagcattatttcttttctttccttttttattgatacgggatcttgctctgtcgcccaggctggagtgcagtggtgcgatcacagcttactgcagcctcgacatcctgggctcaagcaatcttccctcccgcctcagcctccggagtagctgggactgctgccttgcgacaccacgcccagctaatctttaaaattatttttggtagataccgcgtctcgctttgttgcccaggctggtctggaactcgggctcaaaggatccttcggccttagcctcccaaagtgctgagattacaggctaatcccattttaaagagaaggaaacagatttgaacctaggcagctgactccagaatctgtgcttttaactacagttttatgaacatataaagtatgcacaatataactcttattaacgttattattgtcccaaatgttatcccgcatgggagagagtcagttctttctgtgtctgttatgatagccactagccttatgtggatatttaaatttgaatttaaatggattaaaattaagtaaaatttaaaattcagtctctcatttgtactagccacatttcaagtgctcagtagccacagataactagtggatatcagattggaccactcaaaattataggacatcttcattattgcagaaagttccattgggcagtgctgatgtagaatatataaagaattctcccagctcaagaataagacaaccaaccagtggtgtgctggagctgtctcatactatcttgagagtccattgttaaatttgcagtaattttgcaaattggttaaatacagccatttagaaaattatatcaatttaggatgaaataaagtatattgaaaacaaaactcattatttyctaattatttcactacattttacgttttgtgtgcttttgtggttgcttatatctgttgtaactgtgtggtggaaatatatgacagtatgccattgaacatctcttcccaaggtagtattggtagcttgattttggccatgatgggagtatttacaccacagacttagcatatgcagccaggaatggtggctcagtctgtaatcccagagcttttgggaggctgaggtaggaggatcacttgagtccaggarttcgagacccacctgggcaacacagcaagacctgcctctacaaaaaaaaaattttrattagccaggtgtggtggctcgcatctgtggtcctagtgactagctgtggaccacagatgggagccaccacacctgactaatgaaaaagaaaaagaccaacaatagcaaatgttggcaaggatgtggagcaacaggatctctcatatcctgctgatggaaatgtaaagtggtacgaccattttggaaacagattgacagcttcttcgttgtttgtttgtttgttttgagacaaagtctccctctgtcacccaggctggagtgcaatggcacaatctcagttcactgcaacttccatctcctgggttcaagcgattctcgtgtctcagcctcccgagtagctgggattacaggcgcgcgccacactgcctggctgaatttttttgtatttttagtagagacggggtttcaccatgttggccaggctggtctcaaactcctgacctcaagtgatccactcacctcagcctcccaaagtgctgggattacaggcgtgagccactggcggtggttgttttttacgaggcaaggtctccatctgtcgctcaggctggaatacagtgatggaatcatagctcactgccgccttcacctcctggactctaggaccctcttgccttggcttcctgagtaactgggactacaggcacatgccaccacccccagctaattttttgtagagatcggattttgctatgttacccaggcttgtctcaaactcttggtatcaggcaatcctttcgccttagcctcccaaaggcaatgggaatacaggcrtgagacacaacacgtggccaggcagcatcttaagaagtcagttacacaatctaccacacaacccaaccattctgctcctagagggtttctttgtttttaatgaactcattttttattaaagaaatatatgcatacaggacagagttcaaactttattggtttggggtgtccttccaaaattgttttattggctgggcgccgtggctcatgcctgtgatccccacacttcgggaggccaaagtgggcagatcacctgaggtcaggagtttgagaccagcctggccaacatgacgaaaccctgtctctactaaaaatataaaaattagccgggcgtggtggcaggcacctgtaatcccagctactcagaaggctgaggcatgagaatcacgtgaacccaggaggcagagaggttgcagtgagctgagattgcaccactgcacttcagcctgagcgacaaagtgagactctgtgtcaaaaaaaataaaaattaaaaataataaataattttaaaaaatgaattccgtaagttgtgtttttgtttcttctagagacaagttctctctgtcagtcaagctggagtgcagtggtgccatcatagcttaaactctgcagtcttaaactcctgggcttaagggatcatcttgcctcagcctcctgagtagctaggactacaggcacatgccaccacacctagctaattttttactttttttttcttttttttgagatggagtctcgctctgtcgcctgggctggagtacagtggtgcaacctcggcttactgcaagctccacctcccgggttcacgccattctcctgcctcagcctcccgagtagctgggactacaggcgcccgccaccgtgcccggctaatttttttgttttttttttttttagtagagatggggtttcaccctgttagccaggatggtctcaatctcctgaactcatgatccgccctcctcagcctcccaaagtgctgggattacaggtatgagccaccgctcctggccaattttttacttttttgtagagatgaggtctcaccgtgttgcccaggctagtctcgaagtcctgagctcaagcagtcctcccacttcaacctcccaaaatgctgagattacagagtgagccaccatacccagcctccataagttttttttcatgtatgccaacatttgtgtgtgtgtgtttctgtgtgtatacacatatacttatacttttgtgaaaatagttttgttttaatgaaaaatgtcatatccattgtttgacagcttgctttttctttcatgaatctatgctaaacattcagtaaatagagacctgctcaatcatttactctgccaataattgttgagcacttctgtatgtcactgttctagactcctgggatacattcatgaacaaagcagccaaagattcttgccctcatgaagcttacattttagcaggaggaaataaatgacaatgaacatcataaacaagtgaaagatatattggaaggtgttacgtgctatggtaaaaagaaaaagtaggaaagggtaaggaagatagagggagtttggtgaggtgttctacctcaatctggtttttttgatgggtttgtttgttttttgagatggagtcttgctatgtcacccaggctggagtgcagtggcacaatctcggctcactacaacctccrcctcccagttgaagtgattctcctgccttagtgtcccgagtagctgggattacaggcatgtgccaccatgcccggctattttttgtatttttagtagagaccaggttttgccatgttggccaggctggtcttgaactcctgatctcaggtgatctgcccgcctcagcctcccaaagtgctgagattacaggcgtgagccacctgcacccagcattgtttttaacagcagcatagtatttcttacctatccattcactcctaatgagactgacaacatgctaggtaggtattggggatacaaatgtgaccatgtagacragggttctctctaatggagtttatagtctgataggagacagtcaaacaaataaaccaaatgagcaaggtaattgtaggtggtggktaaataccatgaaaaaaataagaaggtaactgtggggccaggatggtgggagctacttmatctagattggtgatgaataaatgcctctctcagaaagtgacattgaggctttcaaataaatgatgasacagaagcagtcctggaaaactaatttttcgcatctcctctttattcctaggatctgtagtcaggaagaagtagtgatcccctgtgcctatgacagtgattcagaaagtgtggatttggagctgagcaacttagagattattaaaaaaggctcaagtagcattgaactgacaggtaaaaaggagaaaggactagaaaggggaggggaggggaaaagagaatgtattttcaactcaggccaagaggtattgattgagtacttgctgggtgaccagcccttgactagactttgatgatgaatttggtccctgactttgagaccttgaaatacagttggcaaaatgagatacatggttcgtgatgtccaggaaactaaggttggtcctgagacagttctgcagaagagtgtgagtgcttgagggattctgaggagggaaagggcagtgtgggataccttggagtgggaggactttatgcagaaggtaagatctggattgggcttcagaataactttcattctacaaaacatgtattgagtaccaggagctgggaatacaacagtagacatgaccaacatggtcactgccctcatagaacttacattattgtgcagaaaagagaccaaaaagagtaaacagacagtcactgaagtaactacaacttgtagtaagcagtatggaagaacaggctgagacaaaaataagggcaataggaacctacttgaaactctggttgtcagagaacacctgtatgagaccatgagtgctrtttaaatctaaaggaggcttgaaagatgtgagagtaactcatgtgagtatagggagtactacagatagatggggacagcatgtgcatgacacaggaaagatcctggtgtgtttgaagctaccttcattcattcatacattcattcagcaaatacttaatgaagccctcctgtgctctaagcttaatctagcagctggagatatagcatcgaacagaacagacacagtatacctacggatgaacaggcaaatggaactcagtgcaatcagtgtgatgggggtgggagagccagagtggatacagagcggtttattagtgacttggggatacttagccaaaataggcaaaaagggcatacacgaaaggcatcctggagctgagacttgaaggatgagtaggagttagcaaggcaaagataggtaagggaaggtgggggagaagaaggagaaaaatgcaggcagaaggaacagcctgtgcacagatcagaatgagaacatggcttcaattattgcaattagtggatgataggaatatggcaggaagtgggtagagtttactgaagaggcattcaagaaatcaaaaagaatgcaaaagtagagtggtggccgggcacggtggctcacatctgtaatcccagcattttgggaggctgaggcgggtggatcacctgaggtcaggagttcgagaccttgcttggccaacatagcgaaatcccatctctactaaaaatacgaaaattacctgggggtggtggcgtgtgcctgtaattccagctacttgggaatctgaggcacaagaatcgcttgaacccaggaggcagaggttgtagtgagccaagatcgcgccactgtactccagcctgagcgacagagtgagactcttgtctcaaaaaaaaaaaaaaaagaatggtaaaaatcttcagatgaaagatgtgttaagggggaaatacttctgggatcagttctttgcatgtattacctcatttaattcttataataaccctgttttacagaaaaggaaacttaggtttcaggaggcaaactagcttgataaaggtcatacaartagtaagtggtagagccaagattcaaactagtctcaaattgagatttaaagtccatagtcttaaccattctgctacagctcagtcccaaaggttttttgtagcttaggaggcccttagagaacattgaatttatttttgagaaaactgagtctaggagacaggatgggacttggttaaggtcatagagcaagtagtaaaggtgagccagaggtactccatactaaaccttatcactttacacagtacggaggcatcatccagtgtctttctttcaatgttagacttggacatccctgacatccctggactccattgtgagcccctgtcacatagccccagacacctgacccaacaggacccgctcagtgaggccattgttgagaaactgatccagtccatccagaaggttttcaatggtgagctaaaggtatgcacaagcaatttttatsagttatccaacttattcctccattttaacaaatattttaaacatattatttcttgattatacaaataattttatattataggttataaaacatgtttgttttatatttataatacatatatttacatatatttataaattatacttacatatataattatgaaattaatgtaaaaacaaagaaaaccataataaaaattaaaagctaatcttccctaattccagtctcaaataactactgctgacattttggtttatatttttttagacttttttttttttttttttttttttttctgagacagtgtctcactctgtcgcccaggctggagtgcagtggcacgatctcagctcactgcaacctctgcctcccgggttcaagtgattctcctgcctcagcctcctgagtagctgggattacaggcacgtgccaccattgcccagctaatttttgtatttttagtagacatgggtttcaccatgttgaccaagcaggtcttgaactcttgacctcaagcaatccacatgccttggcctcccaaagtgctgggattacaggcatgagccgctgtgcctggtcctctatggcttttaaatcccattcacccaatcaacaagtaatgaatgaacagctaccatttataaggcactatgctagacgcagggaagaagttggagtagtaagattaaagactattcacagataaacaaactgggccacaaacagaccgagaccctgtctcaaaaaatataatactattcagcaattaaaggagggaactatcgatacaacagcaaagatgaatcgcagaggcattgtgttgagtgaaagaaaccaatcagaaaaggttacagactgtatgattccagttgtgtgacattcttgaaaagacaaaacatggtgatgcagaacagattagtgattcctaggcattagggtggggagaggatgtgactaaaaagggatagcaggagagaaatttaggggatggtggaactgttcgtatcctgattgtggtgatggttacacatgtgtatgtgtgtgttataacacatggaaccacatgcttcctgccgaaatcagttttactgtatgatacatttttaaaaatcatgttgtcactttgtaccgcataaatatatacaaccataatttgtcaatttaccaaaacacacacaaaacacacacatacacatacacacaaaaccacacagagcctccactggaaggaggatgagggaaacttcaggaatgctagtaataatctgttgctggctacagggtgttttttggtttgtgaaaatccaccaaactgtacattttctttatgtagaataccaatgaaaaataaaaataaaacatttaaagccaacatgttggccttcacttttgacttcagctaatccttatacttcatatcagcatggttttctttcgatttctttgtagttaatgaagggcttggattgctgccatgaattgaaacaaaaaagcccattacctgccttgagctgattccacagtcagtcagggaaatagattaataagaaggtcattatgtcagagtatcgcaagtgctgtgatagcaatttattcatgtggtttgtagatacacttagaaaggacactggaccagccaggygcagtggctcacacctgtaatcccagcactttggtaggccaaggtgggcagatcacgaggtcaggagttcaacaccagcctggctaacatggtgaaacccccatctctactaaagatacaaaaaattagccgggcatggtggcaggtgcctgtaatcscagctacttgggaggctgagacaggagaatagcttgaacctgggaggcggaggttgcagtgagccaagatcatgccattgcactccagcctgggcaacagggtgagactctgtctcaaaagaaaaaaaagaaaggacactggaccctgcttcaggagcaaacgcattctccaagtcttaagatatatagagattttttttttcttttttgagacagagtcttgctctgtcacccaagctatagttcagtggcgcgattttggctcattgcaacctccgtctcccaggttcaagcacacctatagtcccaactactcaggaggctgaagtacaaggatcccatgagcccaggagatgtagactgcagtgagtggtgatcacgccactgcactccagcctggatgacagagcaagaccctgtcttaaaaaaaaaaaaaaaggttctatgataaataggaattttatatatatatgtatgtatgtataattagaaaagaggccgggtgcagtggctcaygcctgtaatcccagcattttgggaggccaaggcaggcagatcatctgaggtcaggagttcgagaccagcctggccaagatgataaaaccccatctctactaaaaatacaaaaattagcttggtgtggtggtgcatgcctgtagtcccagctacttgggaggctgtggcaggagaatcacttgaacccaggtgtaccactgcagtccagcctgggtgacagagcgagactccatctcaaaaaaaaaaaaaaaaaaagaaaaagaaaaagagaggccaggcatggtggttctcacctgtcatcccgtcatcccagcactttgggaagccaaggcaggtggatcacttgagctcaggagtttgagaccagcctgggcaacataatacaaataattagctggacgtggtggtgcgtgcctgtggtcccagctagttgggaggctgaggcgggaggattgcttgagcccaggaggttgaggttgcagtgagctgagatcgtgccactgcrctccagcctgggtgacagagcgagactccatgtcaaaaaaataataataataatagtaataataaaataaaaaagaaaaagagaatgttagtactgagagattttattcttccaatcagaacttggattttaataggaaattttaaaagcaaaataatgaatttttaatgacattgaaagaactagaagtaacagaatcagagaggtcacctttaggaagcttttttttttttgagatgggatctcactctgtcacccaggctggagtgcagcggcaccatctcagctcactgcaacctccgcttcccaggttcaagtgattctcgtgcctcagcctcccaagtagctgggactacaggcacaggcacgcgccaccacgcctggctacttttttgtatttttagtagagacagggtttcaccatgttggccatgctggtctggaactcctgacctcaggtgatctgtccacctcggcctcctaaagtgctgggattacaggcatgagccaccatgcccagcctaggaagcttaatcaggcaacactacacaggacaggcaggtagaaaagcaaagactaagagtggggaaagccaggatggaacatggagctgagaggagagccgaggtctcaaagcaaggcagggccagcggacaaggaatttcactgaaatcttccgtaatttactcattctttgtaataaaagactgatattgggttgaaagagatgtcagatatttaaagcattccaagaaacttttcaaaaactctccacagttattcaaataagattatgacatataattgtatttttatcattttcccacaaattcagggtgaacttgaaaagctgaaattcctaggagatctgtcttctctcagccaagctttaccttatgatgaaaccgcaaaatcattcattcacagccacatagcagacrttgtgcataccttaaatgtaagtattatgaccttatcacaaatgattgggatcacacaaattcagtgacttggccaaagcattttttagtggcttcacctatgttatcaattcacttgaactcttctagtatcagtatctccacatggaggagaaatactcatggccaccccacacatgtaatcacccttgaaaaccaattaaaagaagagtagaaaggacaggaacagcatttgaatttctcagcaaggccaacgctacattctcatgactcaagcagtagttcccagacagtccccataatcrtatgcctaggttcaggggacagccctgcctttttatagctgtgaaactgtaggaaattacttcacttctcaatgcctcagtttcctcccctataaaacaagaatagctatatctacttcacagagctattgtgaccattaaattcaaaataaatataagccatgtccatggtacctaatacacacgagccacttgagaaacatgactatattattgttatcgtattttgttctatttgtacttactccagccacactctgccaccaactcatccattcattccctcattaagtgcctgacagttccaggaactgtcttgggaatttgggctacaaagacaaagaagacaaaatccctatttatgcagccaagcaaggtataataaaatgtcacaggaactgtgacaagtttaaataggcatatggggggcwgagagyagagattgagtggtcagttccatggcaaaggatccagaagggcattgcaaaggagctgatgcactcaagcaagtacttcttggtgttttagttttctcatctgtgaaatgtctccttcagtttctctaaagctttaaaattctgatgttgaaatttcttacatactccagaaatatgagtagttctttctcatatcacagatctataaggctgattagactgatagcttttataattcaaggctaaccagctaacagttttaagtaatggacagttaccaaggatcttctatatccaaacacactgtggtgctttgataaaggttacgcatttcctggaaaccttaatccttgcccttgaagggtttaggatccatctgtaagtagccatatttcaaaaagtaaataggttgagaactattccaaataatacattaagaagaacaggatgatataatacaggtttaacaacaaaaagcggcggctcacatgtgtaattccagcactctgggaggccgaggtgggcgaatcacttgcggtcaggagattgagatcagcctggccaacatggtgaaaccccgtctctactaaaaatacaaaaaatagccgggcatggtggcaggcgcctgtaatcacagcttctcctgaggcaggagaattgcttgaacctgggaggtggaggttgcagtgagctgagatgacacaactgcactccagcctgggcaacagagtgagactctgtctcaaaaaagaaacaaacaaacaagcaaataaaaaaacagtttgagaccagtttgggcaatgtggtaaaactcaatctcttaaaaaaaaaaaaaaaattagccgsatgtggtggtgcatgcctgtagtcccagctactcgggaggctaaggtgggaggatcagctgagtccaggagacagagattgcagtgagccgagatcaagccactctattccagcctgggtgacagagtgacaccccatctcaaaacaaaaacaaaaacaaacagaaaacaaatgcagctttctacttggctgtactccttgggaaaggggatgtaggcaaccgcaggatcataggacccagccagagtggcatgtttctagagctctagtttcaccaaacttggcaacaatgggttgccacatggttcaaccagccagtccataaaatccacaaatgcaggtctcaacagcaacaatgtactgaattacacactgaatctgcatttgcatctgtccacccagtaataaaatgcccacatcagatgtcaatcaaagtataggctggcaggggattcagcctagaagagttaaaggtagctagtatccatgagaaaattgcatggatcactgcagcattgtgtaagtctacaaagtccccacaggcccacacatgggggctgaaaaagcacagctcccagcaaccaaagggagaggtgcccaagaggagaagcatttctgctgaggaaccgacaaggaggaagaagccagggtcattatagagaaagaaaacgttaaggcatttaccagtgcttgtgacccaaaccagtgcatggctccaagtatccaaattaaaaaagccaaggaagccaacaatagaaagtggaaagaagggggaaaaaaatgttatggcacttcaccaaatatttctttttcttttttttttttttttctgagatggagtcttattctgtcacacaggctggagtgcagtggcacaatctcaggttactgcaacctccgcatcccgggttcaagtgattctcctgcctcagcctcccaagtagctgggattacaggcacctgccactgtacccagctaattttgtgcggttttattagagacagggtttcacagtagagaccagcccaggctggtcttgaactcctgacctcaggtgatctgcctgcctcagcctatcaaagtgctgggatgacaggcatgagttcaccaaaaatttctcaaaataagcacatgaaaagatgctgatcattgtgattagggaaaagcaaactaaaacaacagtaagcttcaactatacacctactaaaatggctaaaataaaaaagaaaggcaataccaaatattggcaaggatatggagcaactaaaactctcatacagtgttgccaggaatgtgaaatggcacaaccactttggaaaacaatttggcagtttcttaaaaagtgaaacatgcacttaccatatgacccagcagtttcactcctaggtaaaacaaaacatatgtccacacaatgatgcatgcacaratgtttacagcagctctatatgtaaaagccaaaccctagaagaagcccaagtgttcattagcaggtgaacggataaagaaattgtggtattgtatatccacatgatggaatactacgtgagaatgaaaaggaactattgaaatatgctacaacttggaacaatctcaaaatagttatgctgagtgaaagaacccagataaaaaagaggatatcatgcgtgattctatttacatgaaattcgagaaaatgccaatgaatctatagtgacagcagagcaatggtaacctagaggcagaggttgagtgaggaggagaaggagcgaggaatcacaaagtagcacaaagaaacttttggaagtgatagaaatgttcattctcttgaggatggtgatggtttcatggatatatacatatatcaaaaatcatcaaactgtatgctttaaatatgtacagtttattgtatattgtaaaaaatatacaatatacaatataatataaaaatatacattatataatgttgagaactttaatgaaaaagaaaagaggctgggtgtggtagcacctgcctgtagtcccagccactgtcgaggctgaggcaggaggaacacttgagcccagaagttggaggctgtagtgagctatgattgtacttacgaatagctactgcactccagcctcaggaacatagtgagacccccatctttaaagaaakagagagagagggagagggagacagagagaggaagagaaggaggagggagggaggggagggaagggaaagggagaaagaggagtgagggaaggaaagaaggaaggaaggaaggaagggaggaagggagggagggagcgagggagggaagggaaggggaagagaagggaaggagggagagaggagggaggcagggaaggaaggaaggagaaaggaaggaaggagagaaagaaaaaagaaagaaaaaaaggaaggagagaaagaaaaaaggaaagaaaaaaaaggagagaaagaaaaaagaaaggaaagaaaaagaagaaaggaaggagagaaagaaaaaggagagagaaagaaaaagaaaggaaagacaaaggaaagaagaacgaaagaaaaaagagaagaggagaaatgaaaagaaagaaaaagaggaaggaaggaaagggaagggaggcaggctgtggcaactgggatatagaataaagtgacagcaggattagggtgaaattaatccaggtggatctgacctaatctttgaaagatatgatggataggattgagagaagagagaaaggaccactgggtaaggacttcagatggtaagctgaagaatgctacttggctatgccaaggctagggttctgcattctgcaatatggcagagtggccaggagatggtttttagtgactcaacaacagacatgagcaccaagacctactgtaataaaattttaatgtaaccagatttgcctcttaattctcctctgccaccatgggactccatcggaattctatatctgaggtcctccacaaaaccctccccaccttggacaaatcacttagcttatctgaacatcagtagctctaccagtaaaataaagatattcacatctgctcggcttttgttaagacctttgagacaggctgggcacagtggctcatgcctgtaatcccagcattttgggaggctgaggtgggcagatcacctgatgtcaggagtttgagaccagccttgccaacatggtgaaaccccgtctctactaaaaatacaaagattagccaggcatggtgataggcgcctgtagtcccagctactcyggaggctgaggcaggagaatcrcttgaacttgggaggcagaggttgcagtgagccaagatcacaccactgcactccagcctgggcgacagagccagactctgtctcacaaaaaaaaaaaaaaaaagacctttgagacaaaacgtctaattttgtttggattagttaggattcttcaggcaagaaacaaaaatcacctctggctcacgtaagttaccaaaaaaaaaaaaaaaaaaaaaaaaggatgctgggatatctctcttagactctaaggatgaggtttaaacaagcctccagaaaagtaagtttcaggacagctccagagstctcagaggcaggggcttcgctaccatcaccatgactcaaccctctagcaactcccgctttgtgcctgtcactgtaagattccaaattctgcaagagaaaatctgattggcccaaactagtctgttccccacccctgcatcaatcaggtttgcctgggggcaagatcatatagtaatgatatgacttctgggtgtcccaccctgcgtttcggaggcgttccgagggagaaagggtgattgctgtgatctgggcagtcacccagraagttcctgctacacacatactctactaacaaaaaataccctctcacttttgaattccctgtggaggccagcataactgtgaacaaataataaaccttcaatacccaactgattaaaaaaagaaaagatgattctggcagaagtggatcaagtcaattgaagtcagaggggattgcaagcccggggcttcagctaagagacsctgctttcatccatatgaaggcgtatggctccaggaatggagagtcacagaaaccgtgcagagcagggggtggctgatgctataactgataggaggtagggcttgaacaaaagaaagaatcatgaatcacctttttagtgagccctgggaaagggaacagttgacagctattaaaggataggaagctgtgttcttcgcacggggaccacagtgaactgactttaatgccaaaattctggggatgttagtggtgtgccctggagataaccagatgcagatgagtagagccctgggagagctgtcagggctaaagatagagtcttaggctttgtcccttctggactataaagccrcaagaataaatgtgctccttgagaaaataaggaagaaagcagcagcccaccagcaagatcggagtcagaccaaagctggaaagtaagaggagaaaaactcagaaaggggcaagaaagggaaccttgtagtgtttagtgagcacttactgcatcctaagtttttttgttgtttttgagacggagttttgctcttgttgcccaggctggagtgcaatgacaccatctcggctcactgcaacctccgcctcccgagttcaagcgattctcctgcctcaccctcccaagtagctaggattacaggtgcccaccatcatgyctggctaatttttgtatttttagtagagatggggtttcaccatgttggccaggctggtctcgaactcctgacctcaggtgatctacccgcctcagcctcccaaagtgctaggattacaggcgtgagccactgcgcccagcctgcatcctaagttcctagtgagatcttcttggttgcaggtaagagaaatcctctagaagcagctgaaacacaaaaggtgagatttgttctaaggatcactgagtgcttcccagaaccccttgacaggaggagcagcctgacccaggaagggaatgaatctagaaaataaaaaccttccacatactcaaggagaactttccatatcttatttttgctcctttgtatgaatttccatttctcctctctctctccctttccccccaccccgtctccctctcccccatcttctctccccaaaattggccctctcagttgcctcatccacagggaccagtgcttccaaattttaaattttttcctttagaagaccatccagactgagattgaagctctgtgtcccaattccagattccagagagaatctaatagaccttggtgtctactctgggacagatgagctgtagccagtgggacagaatgacctagcagacacagagctttgaagtacccatttctgtgggttggggacagttcccagaggggcctggtggacagtccagcaaggcttctgctacagtcttttttgttgttgttgttggggggacagagtttcactctttcacccaggctggggtgcagtggtgcaaccttggctcactggaacctccacctcccgggttccagcgattctcctacctcagcttcctgagtagctgggattataggcgccggctttcgaactcctgacctgaggtgatccacccgcctcagcctcccaaagtgctaggattacaggcgtgagccactgcgtccagccagctacagtcatttacattagctcattttctccatacagataaggcaactcaggcacagggagttaaatgacacattcaggctcacacagtgagtgagtggcagagccagtgcgcagcccagggactgtcccactccagagcccctgcttatcactccacgggtttttccagcacagcaatgcactttccctctgccagtttgtaaattggaaagttattctttttccgggacaagtaactcagaataatattagatgtgatcatagagagatggctggtttagtggagagaggagttagaatgcctaaactagaaataatcactggtgataaaaagagtgaataacagacactaacaattacacagggctgctgggtgtcatgaatttgctcagtgagtactcatagccgccccatgaaggtaagtattcctgttttctggttttacagatgaggaactgaggcacaaggaggttaaataatttgtgtcagctcaaacacctggtaagaggcagagccagggtctggggtctggctcaagagaataaacccctatccctgtcactgtcctgctgccaggcatctggggcctaagagcagggctggctgaaggaccttttgtggttcttgctggccacccagtckctgatcgtcactggcctaatgaatgggtactttctcaactctcaagttctttccctctcattgcaggtactggtacaagaggaacgcccgcattctctgtccagttccatgcgccaggaggtctttgtcaccatcgctgatctcaggtgatgcccacacgccccttacacgggcatcctggttcctctcagggccaatgccaggtccaactgacatgaccctttttttttttttttttgtttcaaaaaaaaaaattttcaatggagtccatttcaatggagtctcgctctgtcccccaggctggagtgcagtggcacaatcttgactcgctgcaacctctgcctcctgggttcaagcaattctcctgcctcactcagcctcccgagtagctgggattayaggcgtgcactaccatgcctggctaatttttgtatttttagtagagacggggtttcgccatgttggccaggctcgtctcaaattcctgacctcaagtgatccacccacctcaccctccaaaagtgctgggattacaggcgtgagccactrcgcctggccatgatccatatttttaacttttgaaaactgtttatgtagaaaagaggaagccaaatccgtgtttttgagtaagcactttgatttcatatatgctactatccatatctgaaagactttattggaatctctttggagttcagttttgtccaaagtatatttggcaggaagttactcccatatatgtctcatgacattagagttccggcttctaagaaatttggaagggctgcctattgtytacctctcagagatttatattgtagtgattaagctgatcaaagaccctgagaagtcttgtggttaaaaagttttttaactagattcaacccatgattccccaaatgaacattcagcagaatatgctttggaaaattgtggcttaccacgttagactgtagcaggcttccctctgtggctgaactgaagggaagcctggaaggatattgctscagtaacttcttgggggaaaactcttcctctaaccttttgtgagatttatctgaacagactgacaagctatgccatttatttctcacatcagaacagtacactagcctgtctaccctttcctttttagttgatctctgcttatcagtatcaaatcaaaccgtcttyccagcttgctgttcccaaactgtcttttcttagttaccaagatgtccatttgctgttgggctctgaagatcgagctgagttgttcagtcttaccatcaagagtataatcactctgccctctgtaaggacccttacccagatacaggaaatcatgcccaatgggacctgcaacacagaggtaactcatgctttgctttagtaactttccatccacagggtcagctgatcttggcctttggagagtgcatttgattttttgaaactagccaaaaaccataagccaagtctggtaaataaaataggtggttaaattagaagatagcttctttcaacccttcattttgtcttctttccttttccctttattctttccttccttttggctttaaaataaggtgggagcactcgcttgtgtgcttaacgtttatttaagcacacaatgtgccgtatgtcatcatatgccaaaaatgatgataggcagtaggaatacagcagtccagtcccactcacggaacttacattctagtgcagagagacaaactgttgatacatgcatataatatgtcagctgataataagtgttatgaaaatgtaaagcagggaaagagcaggatcaagggccctgtggttgggaggcacatgggtggtcaggcaaagccttcatgatgggatgataattgaaagaaaagaggtgtgggtatgtctggagagaaagctttcaagcagagggaagggtacgtgcaggccttgatctcttcttcagtggcgaataaactggttggtaaagcagttacccaagaggactttattcccctctgtttgaagakatcagaaagagtcacaagccaactttaaagaatcttgatgacccttaagcagttccccagatgtagtaagactcagtcagctgtgatccctctagtgccgaggcgyctgtttgaaatgaagatgtattcctttttacctcatgccacaaacaacctactagtacctttacactggtactgcaactttgagtaaagtcttagggtcacatgaagagcctccaaagtgtcccatgctaggggaacttcacrtggggccagggagtgttgctgatcctgtgccttttcagtgtctttacaggcagacgtttcaggcattctctgagatgctccagagtttggtggtaaaagacccacatttggaaaatcttgacaccattattaaggtaaacaagatatcaagggagagtgggaaatgattcctattaactggtgaaagtgggagatgaaaatgtggaagkattcagtggtaagaggcaacgtagtaaagagtatcagctatcaactttgagtcagagacttgggttcaaatgctgactctgccattcattggttacacgtcctcccgctagaaattctgcaaggaatttgctctctcagtgttgcatttcttcacatttacatggagataataattactgtgaatattgaataagtggccttcaataaattatttgtttatttattttcagagacagggtcttgctctgtggcctaggctggagtgaagtggcaccattatagctccctgcagcctcgaattcttggcctcaagttatcctcccacctcagcctcccaaagtgctgggattacaggcatgagctactgcaccctgtcacaataaattgtttaaatagttgcttaattattccttaaattattcctgggggcagggcgcagtgtttcacgcctgtaatcccagcacaggccaaggcaggtggattatttgaggccaggagttcgagaccagcctcaccaacatggcacaaccctgactctactaaaaaataaataaataaataaataaatacagaaattagccaggtgtggtggtgcacacctgtaatcccagctactcaggwagctgaggcatgagaatcacttgaacccaggaggaggaggttgcagtgagcagagatcgcaccactgcactccagcctgtgtgacagagaaagactctgtttcaaaaaaaaaaaaaaattattattcctcactagtatagaagggttttattcagtgatgagggaagggtcagcctcaagagttagtaaggccaggcacggtggctcatgcttgtaatcccagcattttgggaggccaaggcaggcgaatcaatcatttgaggtcaggagttcaagaccagcctggctaacatggtgaaaacctgtccctactaaaaatgcaaaattagccaggcatggtggcgcatgcctgtagtcccagctactcgggaggctgaggcaggagaattgcttgaacccagggggcagaggttgcagtgagccaagattgcgccactgtactccagcctaggcgatagagcgagacttcttctcaaaaacaaaacaaaacaaaaaaagagttagtaaataagcagcttcctaccagatgatactcaaaggttataatgacgaactgctctgacctgcacctgttcctgtatatgctcttccatcactagagattgattcattggaattcattcactgcattcaggtatcttgctctcctaccctttttttattgttgttattttatttttatttttcttatcctttttttaagatgcagatatcccagaaagggataaggctttaagctattattaatygtttgcacccaaatgatgcatttattgttgtcctaactgacaagcaaggcacaaaaacctaggcagtcgagtggtttggctgctacaggagcttattttctagcttattttcttaaatgctctgatgggcatttattctcatcctaactgaccttaatactacttctcattcctcttctatttgtacattagcataccagccagattgggtttctcctctttatgcagttgtactttgtactttcctgccttggcagcttaattcaagcctttctttttctcttttttttgagactggatctcgctctgtcacttaggctggagtacagtggcgcgatttcagctcactgcagtttccgcctcccgggctcaagcagtcgtcccacctcagcctcccgagcagctgggactacaggcacacgccaccatgcccagctaatttttgtatttttttgtaaagatggggtttcaccatgttgcccaggctggtctccaactcctgggctcaagcagtcagtataatccctccggcagtgctgggattacaagcatgagcaaccacacctggctgtcctcagagttaaactttaaaattagtagcatgttgttaactttatttctttccaaagcagatttgaaagagctaaaaacattcagaagtacagaataattaattgaagaattgggctgaagagaaagtaagtctagaaaataagctctggccaggcacagtggctcacgcctgtaatcccagcactttgggaggccaaggcgggcagatcacctgaggtcaggagttcgagatcagcctggccaacatggtgaaaccccgtctctacaaaaatacagaattagctgggcgtggtggcgagtgcctgtagtcccagctactcgagaggctgaggcaagagaatcacttgaatttgggaggcagaggttgcagtgagccaagatcacaccattgcactccagcctgggcaacagaacaagactccatctcaaaaaaaaaaaagaaaagaagctcctaagctcctatataacaaccaaaccacccaccacccatgtctttgtgccttgcttgtcattctaccacttttatttccaacctgagctataatagcatttagcaaagtattttgagatctggtagcaacatggaacttgtcactccacatttctttctaaacacaataaggatggtatcccaaatcttcctgataaaccatttagcctccctttatttctcacagcacttggtcccctggttacagtcagtcaaagaccatgagcgggaacgggccacggccagcatggctcaagttctgargtgcctatccaaacatctcaacttgaaggtgagcggcccttcagttgcagaggaggaaagatccaaagccattccctcactgccgatttmtcctcctctttataactccccaggctggttctgtrtccccttcgtgctcatgtactatcatagcacttagcattgtcttcttatctgctcttctcctgagcagcttggggccagttgctgtgttgattaatctttgcatctccattgcttaacacaacagctggaacataatgatatagtaactataacctgaaaatacctgaggcccatggtggctagtctctgtatagtattatatttgagtacagcaggcaaatttaaataaatcaacttcaatatctcccagcaactcaaagagagtggtactatggcacctcttcagatcctcacatttctctttctctctctcacttctcagttctgaatcatctcccctatggcatctcattattatgatgatcattattcaaggcagggtcttgatccatcactcaggctggagtgcagtggggccatcatagctcactgcagccttgaactcctggcctcaggcaatcttcctgcctcagccttccaagtaggtgggactacagtcacacgccaccacgcctggctaatttttatttatttatttatttattttggtagagatggggtttcaccatgttgccctggctggtctcaaattcccaggttcaagtggtcctccttccttggctttccaaagtgctgggattacagacgtgagccaccacgcccgtcctcttctggatttttctgaggaaggtccatagtttttttttaaatcaattttattgaggtataatttgtatacaatgaatttatccaatttaagtatacagttcaatgagttttgacaaatatatattatctgggtctctaacttttttcatattctcaaagaaatctaaagaataaagaataaaaaaggwaatgctgaagaagcatttagtaatcaaactaggagcgtaattcttcagtggccttttttgtcttgataaagtttgggggttcttaatattatgattataaaacttagggccgggcgcggtggctcacgcctgtaatcccagcactttgggaggccgaggtgggcggatcacgaggtcaggagatggagaccatcctggctaacacggtgaaaccccgtctctaataaaaatacaaaaaattagccgggcgtggtgacgggcgcctgtagtcccagctactcgggatgctgaggtaggagaatggcgtgaacccgggaggcagagctttcagtgagccgagatcacgcaactgcactccagcctgggcgacagagcgagactccatctcaaaaaaaaaaaacaaaacttattaactgtttgtcattcagtgacaggtgcaggccaccacgcctggctaatttttgtagttttagtagatacggagtttcaccatgttggccaggctggtctcgaatccttggcctcaagtgatctgcttgcctcggcctcccaaagttctgggattacaggcagagccaccgcgcctggcaccttccaagttcttttttgtgcatgagtgtgttggggtgggggcttccatttccaatttgttctctacatatagccagagtcatcctcttcagacccatgtcattcttgcttttgttttgtttccttgttttctcccctgtgttttctttatttttcttcattttctttttttgccccatgtcacttctttgatccagtgatttccaaactgatcttagaatacggggtcatgtctgatgtaggtctgtctacctctctacacctaagtcccctgacttatcacacagcagccacctttaccttccttcttcccacataaggctcatcttgcctcatggcctttgcacttgctgccttctctgcttggaatgaccttccctagctctgcacagagccagcccctcctggttctttagcactgtgttcagatgtctcgacctcaaaagggcctctgctcaccacagacagacctacgcttgctctctgtctcatcactctctccttcctagggctgtctagaatcagaggttatctggcttgattctttctttactgctgtgttatctgtttcccactaatagaatgtaaattctaccagtgattatgcttgtcttttttttttttttttatgtgagacagggtcttgctctgtcacccaagttggagtacagtagcacaatcacagctcactgcagcctcaacctcctggccttaagcaatgctcctgccttagcctcctgagtagctgggactacaggcatgtgccaccatgcctggttaatttttttgttttttatacagatgggggtctcactatattgcccaaggtggtccaaactcttgggctcaaacaatcctcccacctctgcctcccagaatgctgggattacagacatgagccactgtgccttgcaattatacttgtcttgttcagcacagtagcctcagtgcctgcctagcacagaatcggccatgtggttgatgctcaattcaatattgattgagtaaatgtgagtcaacccatgtcccttctctgctcaagaccctccgacggccaaagtcctcacaatgttctacaggttgcgacaccttctggcccattcttcatctacttcctatttctttccctatcgttaacatcgctgcagccaacctaacctacttatggttcctcagaaacaccaaacatatcttctcagtccttggcgcttgccattctctctgcccagaatactcttctcccaggtatcaatctctcatttcaatattagtgaggccttccctgaccatcctaaaataataattcttatccctttcccctgaatttttgttaatcatgacatttatcatcatttgatacataatacattttacatatttattttgtttactttgtgtttycccaactagatcatcacctccacaagcagggatattctcttttgttgactgcttatatccccagtgccagtcatagttcctggcatataacagacactgtatttattggttgattgaatgaatgaaggttatatcagtgaattaaagatgttacatagctttgcatgttgctacgtgtttactgtaaataggttgtaaatgctgttcacaatatttctgtgtcttatttctgtagagccatggaagaaatttctttccatctcaaccctaggaaaagctatgcttcctccacgtggctagttgcttcttatcttaaggacagcgtgaatcatgttatatggatcattgtgtgcacctctacattagccatgagagagttcagagccttgctctgtggcctgcctcaagcaaatgatgattatgcattctgcatgccaaccaaattctttttttttttttttttttgcatgctgccttcaagcatctgtttaacaaagcacatcttgcaccgcccttaatccatttaaccctgagttgacacagcacatgtttcagagagcacggggttgggggtaaggttatagattaacagcatcccaaggcagaagaatttttcttagtacagaacaaaatggagtttcctatgtctacttctttctacacagacacagtaacaatctgatctctctttcttttccccacatttcccccttttctattcaacaaaaccgccatcgtactcgtggccgttctcaatgagctgttgggtacacctcccagacggggtggcggctgggcagagggacttctcacttcccagacgtggcagccgggcagaggggcccaccaccccccagacggggcggctgccaggcgggggcaccccccacctcccggacagggcggctgccgggcgggggcgccccccacctcccagacggggcggctgccgggcgggggcgccccccacctctcggacggggcgtctgggcagaggggctcctcacttcttggacggggcggccgggcagaggcgctcctcagttcccagacggggtcgcggccgggcagaggcgctcctcacctctcagacagggtggcggccgggcagaggcgctccccacatcccagacgatgggcggccaggcagagacgctcctcacttcctagacgggatgacggccaggaagaggcactcctcacttcccagactgggtggctgggcagaggggctcctcacatcccagacgatgggcggccaggcagagacgctcctcacttcctagacggggtggtggccgggaagaggcgctcctcacttcccagactgggcggccgggcagaggggctcctcacgtcccagacgatgggcagccaggcagagacgctcctcacttcctagacagggtggcggccgggcagaggctgcaatctcagcacttcgggaggccaaggcaggtggctgggaggtgggggttgtagcgagccgagatcacgccactgcactccagcctgggcaacattgagcactgagtgagcgagactccgtctgcaatcccggcacctcgggaggccgaggcgggcagatcactcgaggtcaggagctggagaccagcccggccaacatggcgaaaccccgtctccaccaaaaaacacaaaaaccagtcaggcgtggcggcgcgtgcctgcaatcccaggcactcggcaggctgaggcaggagaatcaggcaggaaggttgcagtgagccgagatcgcggcagtacagtccagcctcggcaacagagggagaccgtggaaagtgggagacggagacgagggagagggggagaccgtggaaagcgggagacggagatgaaggagagggagagcgccaaccaaattcttaacttcatttatcttttctaccttaatgtttttttattatttttaatttttttaatttttatttatttatttattttgaaatggagtctcattctgttgccccggctggagtacagtggtgcaatctcggctgactgcaacctccgcctaccaggttcaagcaattctcctgcctcagcctsccgagtagctgggattacaggcatgtgccaccacgcccagctaatttttttgtgtttttagtagagacggggtttcaccatgttggccaggctggtcttgaactcctgacctcaaatgatatgtccgccttggcctcccaaagtgctggggttataggcatgaaccaccgcgcccagccaattttttaatttatccagttttctccagtatttatttaaagttatatttctttttctggtatgatttttccagctacattacatggattttttttccataatcaagcaggatattaaaaaatgaattttataaatagaattaagtgctatatctcaactttgcgttcagcttatttttattttttattttatgtatgtatgtatgtatgtatttatgtatttatttatttattttgaaatggagtctcactctcgtcacccaggctggagtgcagtggcacgatctcagcttactacaacctgcacctcccaggttcaagcgattctccttcctcaacctcctgagtagctgggattacaggtgcccaccaccacacctggctgattttcatacttttagtagagatggggttttgccatgttggccaggcaggctggtctcgaatccctgacctcaggtgatccacccgcctcagcctcccaaagtgctgggattactggcatgagccactgcacctggccacattcagcttttttacttagcagaatagcacattataaattccttagatacttgatttttaatggttgtgttcmtagactggctgtaggataattccttttactactgtcatgcaattatttccaaagcgcggtccttagaccaccgctgggtctataccccaaagaaaggaaatcagtatatggaagcgatatctgcactcccttgtttgttgcgacactcttcaccatagccaaggtttggaagcagcctaagtgtccaccaacagatgaatggataaagaaaatgtggttcttatacacaatgaagtactattcagccataaaaggaatgagatcctgtcatttgcaacaacatggatggaactggaggtcattatgctaagtgaaatgtgccaggcatagaaagacaaacatcacatgttttcacatattgtgggacctgaaaatcaaaacagtttaactcatggagatagagaatggaaggatagttatcagaggctgggaagggtcgtggcaggattggggagaggtgggcatggttaataggtaccaaaaacattgttagaatgaataagacctaatattttatagcacaacagggtgactattgtgcattagtaatttttaaataatattaaaattttaatacatttttatttagtaatattaaatgtacgtttattggccagctgcagtggctcaggcctgtaatttgggaagctgaggtgggtggatcacttgaggtcaggagtttgagaccagcctggccaacacagcgaaaccccatctctactaaagatacaaaaatcagctgggtgyggtggctcacacctgtaattccagctactcgggaggctgaggcaggagaatcgcttgaaccagggaggcagaggttgcagtgagctgagattgtgccattgcactccagcctgagtgaaaagggcaaaactctgtttcaaaaaaaaaaattattaaaataactaaaagaatataattggactgtttataacacaaaggataaatgcttgagggggtggatactccattttacatgatgtgattactatgcattgcatgcctgtatcaaaacatctgtataccccacaaatatatagacctactatgtactcccaaaaattaaaattaaaaaataaaaataaaaacagtgctggaattaacatctttatgcacaaagctttttcgtttttcagattgtttccttaggttagcatttccctatttcttaataacaccatctactgactatactgtgtctacctgtgttaaatatgaaccctacagagatccacaggctgattgtgacccttaaacttcttgagttgagagtagaattgggattacttctcaacaactcaaatcgaaggcactaaatgcacgtgtattctaatgacatttttctttttctttctcaagcttccactgcgattccaaagacttggacacctagtggctctgatggcactgctctgtggggacccacaggaaaaggtggctgaggaggctgcagagggcattcactccctgctgcatatcaccctgaggctgaagtgtaaggcactgctgaaggccgcgaggtcctgagtgaattctccagcacaacataagtacctgccctccttacgcattcagtccccatgttctggaaaggccttttacagtagttcctaaagagaaggatacatgrtccataggcagagatgaagcaacactgacttaataattagaatcctaacactagatcagacccatcattgccatccatctgcatagccagggagtggctaaacatgtggccctgtggacaaactagagtgattagtttggtcagaagtaggagtgaggctgggcgcagtggctcactcctatgttcatagcattttgccaggccaagccgggaggactgcgtgggcccaggagttcaaggccagcctgggcaacagggaaaaccccttctctacagaaaattttaaaaattagctggcatggtggagtatgcctataatctcaactactcaggagacgaaagtgggagaatcgcttgagcccaggaggtcgaggctgcaggaaaattaatgtccttatgaagggaaattacaggggccatgagtaagaatcaaatctagttgctgggttcaggaaaggtaatccagagaataaagagcagtttgccacctgaagaggtaagaagagtatattaggcagaaggaatggctaaggaaaggaacctgggtaggcatgagcttgaggagtttgaaaaatagagagagggccagtgtggtcaaggaatgaatcactgacttccatggttagaagggactttagaggatatctaacccagcattcccccagtgtttgaatctcagtctactccatccctaccaagtacagtcatgcaccatataatgacatttcagtcaacaactgatcatgtatgggtcacgtaagattagaatggagctgaaatttttctttttattttattttattttattttgagatggagtctcgctctgtcacccaggctggagtgcagtggtgtgatcttggctcactgcaccctccacctcccaggttcaagcagttctcgtgcctcagcctcctgagtagctgggattacaggcagccgccaccacacccagccaatttttgtatttttagtagagatggggtttcaccatccctactaaatgttacttaatgttggccaggctggtcccgaattcctgatctcaagtgatctgcccgcctcagcatcccaaagtggtaggattacaggcgtgaaccaccacgcccagccttattattttttttttttaaggaagtctcgacttggcacagtggctcacacctgtaatcccagcactttgggaggccgaggcgggtggatcacgatgtcaagagattgagaccatcctggccaacctggtgaaaccccgtctctactaaaaatacaaaaattagctgagcgtggtggcatgcctgtagtcccagctacttggggtgctgaggcaggagaatcgcttgaacctgggaggcagaggttgcagtgagccaagatcacaccacggtactccagcctggtgacagagcaagactccatctcaaaaagaaaaaaaaaaaagaaagaaaaaagaataaaaagaaacgaagtctcactatgttgcccaggctggtctccaactcctgaactcaagcagtcctcctacctcagcctcctaaagtgcagggactacaggtrtccaccaccgtacccagctgagctgaaagttttctatcacctagtgacattgtagccatcataacattacagtacaatgcattattcatgtttgtggtgatactggtgtaaacaaacctactgcactgccagtcatataaaagtatagcacctacaattaggtacagtatatatccttggtaatgataataaataactatgttactggttcatttatttactatacattttatcattagtttagcatgactccttctacttattaaaaaaacagttagctgtgaaacatccccaggcaggcccttcaggaggtattcctaaagaaggcattgttatcataggagatgacagttccatgcgtgttattgccctgaataccttccagtggggcaggatgtggagatggaagacagtggtattgattatcctgatcttgtgtaggcctaggctagtgtgtgttttttgtcttagtttttaacaaaaacactttagaatgtaaaaaaaaaaaaaaattaggccaggcacagtggctcatgcctgtaatcccagcactttgggaggccaaggagggtccatcacctgaggtcaggaattcaagaccagcctggccaacagggcaaaaccccatctctactaaaaatacaaaaattagcctggcgtgatggcgcgtgcctatagtcccagctacccaggaggctgaggcaggagaatcgcttaaacgtgagaggtggaggttgcagtgagctgagatcacgccactgcactccagcctgggtgacagagtgagagactctgtcttaaaaaaaaaaaaaaagtacactctatgtgatgttcatgcagtgacgcaatagcctaacagtgcatttctcaaaacatatccctgttgttaagctacacacaaccgtagttcctctgcctcagtctgcgcttcacatggatgaggaagctccatgcttcccaaagcaactgtcctgtcattgggcacagtatgagcaatctctaccaggtatacagccaaagaaatacgttgattattgattcagcaaatagttatgaagcatttattgttctagtgatgcatcagtaatcaagacaaacaagataccttcccccagggaacttattttctagttggagagaaartatcctcagccaagggctcaaagataaattttccatctacgaatttccagcaaatattaggtcacaatgaaacatgagaaaaacaagacactacaaggagcattggcatacttgacacatgatgaagagttctgatatcagaattatcatacacagtatagagttgggcaattttttctgggaacctaagcttcatagggagacccctcacagttcctcaccagtggggaaataaggtagcatgctttggttgtactcacaaatcactcaaatgctctggtcttacaaaaagctctttgcttttgcttttttcttcttcttcttctttttaaagacagggttggctgggcatggtggctcatgcctgtaatcccagcactgggggaggctgaggtgggtggatcacctgaggtcaggagttcgaggccagtctgaaccaaaatggagaaaccccatctctactaaaaatacaaaattagctgggcatggtggcgcatgcctgtaatcccagctactcaggaggctgaggcaggagaatcacctccaggaggcagaggttgcggtgagctgagatcgcgccattgcactccagcctgggtgataagagtgaaactctgcctcaaaaaaaaaatttaaaaaagaaaagacagggtcttaactctgtcacccaggctggagtgcagtggcgtgatctcggttcactgcaagctccacctcttgggttcaagtgatcctcccacctcagcctcccaagtagttgggactacaggagtgcgccaccatgcttggctaatttttttatttttcggtatcgccatgttggccaggtttgtctcgaaatcttgacttcaagtgatccatctgcctcgacctcctctttgttttttcttttggttctttttatgtattgttctagaaggaaagagaaataaatcagccttcagatgaacaaacactccctcccccaggcatttttgttcaagtgaaaaagaagagtgagatcttggaatccactttaaactgaagatcaaccagacctgtaaaatcaagaagaaaaaargaagccagaaagtattaatattttatattttcttttcagatatcactcatgacaagaaagatcagcaaaacttgaaaagagcattgacaaaatgtcgagaattcctggagctccacagctctgccgctaaatgcttctacaactgtcccttcagaattgcccaggtaataagaatggctaaaattataaccacagccagaagtgttggcaaggatggggaacaaccagaagtctcctgccatttattcatggaaacgtaaaacagtaaaaaccactttggaaaaagttctggtagtttcttataaaacaaaaccatacacaattgcccaggaaacgtggtctctaaacgttccgtagtttggagacaaggcaccatgttcctggcccatatatgccttgccttcttagtttgggggttaaggtcaacctgccattgaggccagtatccctggacttcacttcataccagctctgctcctactattcataattgcgagtctcttgcaaatgtaaatgctggtcacaaaaaggagctgcaagagagtatggttgatccaacaagccagactttttaaattaatgtagttattcattattcaataaatacttatacatctgccaggtaccaggtatgctagggaataggggaaaataaagaaaacccacagatcttactcatgtagggtgaaaggtaccaagtaatttcatctctctgcacatcagttttctcatctgtgcgatggagatctgtaaaaattgggacagtttttacaatttcttttttacaatttatactgtttacaattcagtcgttgttaaaggagataccgtatggaaaatgctttgctaaatgcttgtcacatagtaagtgcccagtagattgtacctattataatcatgtgaaggactttactaccaaatgcaatgagaaacagaatgacacattcttttagtatgttgtctcctgacaaggcattttaattatgcctgggaacctgtcagctgtgtaacattagggcctttttttaagtcctatcgtataaaagtatgactctttctgaagatctcataataaagcttctttctttttcttttctttccttttctttttgttttgttttgttttgttttgttttgtttgggggggctgtttctttgagacagagtttcgctcttgttgcccaggctggaatgcaatggcgcaatcttggctcactgcaacctccgcctcctgggttcaagcaattctcctgcctcagcctcttgagtagctgggattataggcatgtgccactacacccggctaattttgtatttttagtagagatggggtttctccatgttggtcaggctgattttgaactctgacctcaggtgatccacctgccttggcctcccaaccaaagtggtgggattatagacatgagccacatgccaggcttctttttttttttttttttttttttttttttgagacggagtcttgctctgtcgcccaggctggagtgtagtggcacgatctcgtctcaccgcaacctccgcctcccagattcaagcaattctcctcccgcagcctcccaggtagctgggattacaggcaagcaccaccacgcccagctaatttttgtatttttagtagagacagtgtttctccatgttggccaagtggctagtctcaagtcgtgggctcaagtatttctcccgctttagggtcccaaacaactgggattacaggcatgagccactgcacctggtcaataaagcttctttctaaatgtaagagcagcaggctggatgcagtggctcacccctgtcatcccagcactttggttggctgaggcggaaggatcacttgagcctaggattcgagaccatcctgggcaacatagcgagacctcatctccacaaataaaaaaattagctggctgtggtggtgcacgcctgtagtcctagctactcaggaagctgaagtgggaggatgacttcagcctgggaggtccaggctgcagtgagctgtgatcgcaccactgcactccagcctcagtgtcagagcagcaaaaggccatgcacagatgctagcagtggacatttggattgcttccacctttttaccatggtaaacaagactgggctgggtgcatggcttgcacctataatcctgacaytttgggaggctgaggcagaaggattacttgagccaagagttcacagccagcctgggcaacatagtgagacccctgacttcacaaaaaawtttaaaaattatcagagtgtagtagcaggtgcctgtagcctcagctactcagaaggctgaggcaggaggatcacttgagcccaagaggttgaggctacagtgagccgtgattgtgcccctacctggatgacagagtaagatgctatctccaaaaacaaaacaaaaccacargactcaaataaaacagccttgtacatctttgtccacttctctgattgttaacttagactcaagtccttgttcaggacactttctatcataccatatttccctatttcttggaagttcattttcctacatcatttcaggtctttgaaggttttcttgattcaaatgagctctgccagtttataatgactacatttgataccctgaaaamcctgaaacatccctgcatccagcgatcagcaggagaattactgctaactttggcraaaaatacagagtcccaatttgagaaggtaaactttcagtggcaatttcctgggttcaaaaagccagtagaacctcttcatccctgcagctattgaagtctctgcttgtccttctcagctgagaacgactactcatgagtacagggtcaaaccttagtctgtttagtcataaatatccactctataaacatacaccaaacaactactgtgtatgtaaccagggagggagacttttttttttttaatctaagatgtggtctatgaccaggcacggtggctcgcgcctgtaatcccagcactttgggaggctgaggcgggtggatcatgaggtcaagaaatcgagaccatcctggccaacatggtgaaaccccgtctcaactaaaaatacaaaaagtagctgggcgtggtggcgcgtgcctgtagtcccagctacttgggaggctgtggcaggagaatcgcttgaacctyggaggtggaggttgcagtgagccaagatcgcaccactgcactccagcctgggygacagggcgagactccatctcaaaaaaaaaaaaaagatgcggtccatattttctagaagagtagagtttttctggggagatataactaacacatatgagaataactttaatttagatactcatccagatgggttaaaggtatcaagatttaaaaagctgtaagtggtcaggygcagtggctcaygcctgtaatcccagtactttgggaggcaaaggtgggcagatggcttgagctcaagagtttgagaccagcctcggcaacatagcttaaccctgtctctacttaaaatacaaaaattagccaggcatggtggtgcacacctgcattgccagctatttggatggctgaggcaagagaattgctttaacccaggaagcggaggctgcagtgagctgagatcgcgtcactgccctccagcttgggcgacaagctgcctcaaaataaataaataaaagtaaataaaaagccataagtgaccctagaaggaggcagacttacaaatcaaaattaagagaatttatctaaatatatctaaaattaatacattaagaaataactatatagttatgttatttagaaatagagaaggacatgctggaagagacaaaagggataaaagtagttctctctgaagaacagacctggggaatagggaggaaagaagcttgaaataccactggatgttgtagttgggtacaaataaaaaataatttaagaatgatgagaaccggccaggtatggtggctcacacttataatcccagcactttgggaggttgaggcaggcaaattgcttgggcccaggagttcaagaccagcctgggcaacatagtgagaccccatctctacaaaaaaatttttttaaattagccagscatggtggcacacacctgtgttcccagctacttgggaagctgaggcaggagggttgcttgagcccagtaagacaaggctgcagggagccatgatcatgcctttacattccagcctgggcgacagagggagatcttgtctcaaaaaacaacaacaaataaaacaaattaaaaacaacaacaacaaatgatragcaccctttttttaacctattaaaataacaaagatgcaaaaagaataacacgataagagcaggtgagatgggcatttgtatcagttgggtgcttttagcagcaaaaaaagcccagcaggtagaagtttaaccaaaggatttattctttcacataataacaagtctggacatagagtattttccaagattgattcagtgattcaacagtgttattgaagacccaggggtttcttcatccttctgccttgtctgttcatgtggtcataaggtagtcagagcaattttggactttctgagtggagtagactaagtccaagaagaagaaagatgttgccttcctttttatgtcttgattcagggaagaaaatctttccgcaaaacgccggtaaatttacccttgtgtttgttagccagaattattatcattattattattattattattttgtttatttgtttttggagacagcattttgctctgttgctcaggcttgagtgcagtggtgcagtcttggctccctgcaacctccgcctcccaggttgctgtgattcttccacctcagcctcccaagtagatgggattacaggcgcctgccatgacaccaagctaattttttgtatttttagcagagatggggtttcaccatgttggcaaggcaggtcttgaactcctgacctcaagtgatccgcctgccgcagcctcccaaagtgctgggattactgctatgagccaccatgcccagcctactggtgctgatgatggccattttatattaagtggttgargtgtgcctctctgagaagctgacatttccacagagacaggaacccatgcgtctgtgggtgggaagagcggtccaagcagagaaatagaccaaagcccagtggctcctatttcccttacctaagcctgatggacatctctggaaagaagataggtaaggactccactgccattctcagagtcacagtggaaaaaagcccagcttccttgcaacacttttattagtttgtcttgttataaaatcaatacatcaattattgaggaaaaattagaaaaaatatagaagcaaaaaaatctaatactctgtccctcaaaaacacagtattgacagctttgattataaatctttccaaatccttcatatgtgtatacacacatacagatatattttaagtagttttaatcataaacttcaaaaaataataaacagtttgtttaaaagtcaccccctaggggtcaggcgcagtggcttatacctgtaattccagcactttgggaggccaagcaggaggatcgcttgagcccaggaattcaagaccagtctgggcaacatagagagatcttgtctctacaaaaaaatacaacaatgacctgggtgtggtggtgtgtgcctgtagtcccagctactcaggaggctgaggtgggaggatcatttgaggccaggggttcaaggctgcagtgagctatgtttgcaccgctgcattccaggctgggcaacagagcaagaccctgtctttaaaaaaaagtcacccccccaagacctttcagaaatggccacagtatcctcagtaaccatcagtgtcctataggattacagtcttagtaatttctttttcctcttcaggtgccagaaattatgggagttatctgtgcccagttayccataatcagccagcctagagtccgccaacaaatcataaataccgtgagtttatttatatccagacccaagtacacagatatagtgctcagcttccttctgtgtyatccagtgccgtataacaggtaacagaaccccgtacagcctctggattaaattggattatgtgacacagctctgggtattgtgaaacatggttgccctcaaaaatctaatgattgtcttgtggagaagacacagtatacataaagctggtgatataaatcagaacataatgcataatcatcagaaaagaatcccacaaatcccaaatgaagaacattctgtaagataattgaactggactcttcaaaaaaattaacatcatggaagtaaaactggtggtgagggaactgtcctagataaaaagatattcaaaaacatacccaaaygcactgcgtgaccttgattggatcctggttcaaaaacaaaagctataaaagaaagcttggagaaaatttaaatatggactctatactagaatattaaattggtgtaattttctggctaggcacaatggctgacacctgtaattccagcactttgggaggcagaagtgggcagattacttaaggccaggagttcaagaccagcctggccaacatggtgaaacctcatctctactaaaaatacaaaatttacccccgggcatggtggcagatgcctctaatcccagctacttgggaggctgaggcaggagaatctcttgaacccaggaggaggaggttataatgagccaagatcacaccactgcactccagcctgggtgacagagtaagactctgtctcagacaaacaaacaaaaaaaattagtgtaattttcttaggtgtgaaatactgtggttatgcagaaggatgtccttattcttaagagataagatactaaagttatttagaggtaaagtgtcataatgtctgcaactgacttgagaatgattttgcctaaaaataaggcaataaatatatacatttaaaaagtagatacgcatacataaagaagaatggaatcagagagaggatcaaacaggatgggttttttgtttatttttgtgggtacatagtaggtgtaaagacggttttttcgattagtgtttttcacatttggaggcaccctggaaagttccacaaagatgcctacggatggggcaggaaggcttcagaataaagttccatgcccccaccccactttaaccagagcagcgcttctttttatctgctttctctattgtgattctgggcaattattttatttaagaagagatttccctgctttaaactatttgaaaaatattcttttaagtgaatggttctcacataatatcttgatgtagtgcttattgtgttctctaaactgaactaaatcaaataatggaagacttttacccattcagagaaaaaaaagaatgcggatttttttaaaagctgggcgtggtggcacgcgcctgtagtcctagctactcaggaggctgaggcaggagaatcactggaggccaggagtttggggccatcgtatatgatgattggacttgtgaatagccactgcactccagcttggagtaacagtcttactttttttttttttttaaagacagtttctcaatcatggctcactgcagccttgaactcctgggctcaagtgatcttcccacctcagctgcctgagtagctgagactataggtgtgtaccaccacactcaagctttttaaattttttaaaattttttgagcttgcttttgtatatttctctaacaaattgttcttaaatgtttggtacttgctacagcttatccgtactcaactcttatataaaaattaatctttcagaggccaaagggggtggatcacccaaggtcaggagttccagaccagcctggccaacatggtgaaaccccatctgtattaaaaaaatacaaaaattagcctggcatggtgatgcgcacctgtaatcacagctacttgggaggctgaggcaggagaatctcttgaacctgggaggcggaggttgcagtgagccgagatcgcgccactgcactccagcctgggagacaaagcaagactctgtctcaaattaaataaataaataaataaatctaagtacaaaatactaaatatatttagttttgttttttgtggggtttttaaagacagggtctttctctgtcacccaggctgcagtgtagtgacacagtcatagttcactgcagcctcgaccttccaggctcaagcagtcttcccacctcagccactggagcaactgggactacaggcccacaccacctggcccagctaaattttttattttttgtggtttctcaatgttatccaggctggtctcgaacttctgggctcaagtgatccacctgcctcagcttcccaaagtgctaggatgacagacatgagccaccgtgtgctgccctatttaattattttaagtatgcttttagcattattctcttgtttgtatttgttctacctctgggaggactttgagaactgctgtagatcatacgcaaactatggaatcttttagaaatttaactgacttattcaggaaatgttattattattattattattaattttttttgagacagagtcttgctctgtcacccaggctggagtgcagtggcgcgaactcggctcactgcaagctccgcctcctgggttcacgccattctcctggcttagcctcccaagtagctgggactacaggcacccgccaccacccagctaattttttgtatttttagtagagatggggtttcaccgtggtctcaatctcctgacctcgtgatccgcccgcctcggcctcccagagtgctgggattacagtatttttagtagagagggggtttcaccgtggtctcaatctcctgacctcgtgatctgcccgcctcagcctcccaaagtgctgggattacaggcatgagccaccgcgcccggccaggaaatgttattctgattatatttttgtcatttacctgaagttcattatgtcacaggggagcaaggactgggctggtggcgctggggtaaaagaatttaccaagacagttgtgggtagaggaaggcagatttattagagaaagtaggaaaataatggcgccagagagacaacagacagcctgcaaaagagaagcggactgccaggagacaaagacttgttgaagattttacagcatagtgttcatgctgcgtgttgaagagggccttgtgcagtatagataatgccaagttgcaatgagctaatttgcaggtgtctggtgatagttgggcacaggaagatggggagttgattgcacagaagggccgtgtcctggaccatgaagaaaggcagacttacagcttatctgctttttctttttgctttcccttgctcccgccagcctggcttccttcccctaattaggactccacacgttagtgggtttacatatagattggagtggttgttcttaggaggctgcctaaagcatcaactatgtgcaaggtgctattaggacccataagtaatggacaggacatgcaccccgcccttaagcagcacagtctggtagccccatagatgcataagtattctaaagctaagtagggagttctgtggaagcccctaggtcrggacttaattaaatgaagggtcaggaagtgatttctgaaagcagagctgcccccaagctgatgaatgctaagagccagatgcagatcaaagtggctggagaggaaagtagatagtaagaagggctcagataccagggatctttttgcagtgatggaaatgttctaaaattggatcgtcgtcatggttgcacaactttgtaaatttactaaaagtcagtgagttgtatacttaagacagtattcactaattattttttcattttctatagtaatataatccctgaactttagttgggtatttgaaatactcttatttcctagactttttgcatataggtgtgactatttgtctaaattctggatgcaaattgaagtagtacatgcaacctatggcaaataaccttaaagggagagagtaggctcatcatctttcttcttcctgccacctggaaagtgatgtgatggctagagctgaagcatgttggccaggatggtctcaatctcctgacctcatgatccgcccgctttggcctcccaaagtgctgggatttcaggcgtaagctaccacgcccagctactaaagctgcttttaaaaagtggtcagaagttagcagcgatagattgggaccaactaagaactacaatagtggactttatactacaggagttgggaagccactgaagaactttagttaagggacttacatcatcagatgcagatttttagtgtgactctgatggaaatggattagaggctgttctaccaaacaggaagagagacaggcagttaagcagttgcaccttttccaggcaaaagatgatgatgccctgattagggcagtggcttcagagatggagaggaggagggagtaaagaaacaggagcattggccagacacggtggctcacgcctgtaatcctaggactttgggaggccaaggcaggtggatcgcctgaggtcaggagttcgagaccattctggccaacatggcgaaccccatctctcctaaaaatacaaaaattagccgggcttggtggcatgtgcctgtaatcccagccactctgcaggctgaggcaggagaattggcttgaacagtgagccaggatcacacgacttcactccagcctgggcaacagagcaaaactccatttcaaaaaaagaaaaagaaaaaaagaaataggagcatctgtaggcagaccttgattgaatcagaaaggaatggcagggaggaagaaggcattcaggctaactccccactcctcagtttttggctttggaggccaagttaatggtggtatcatttactgacacaggaattacactacattttcaccactgactgtttctctatgggacatgaaatactttaagaaactcagttcactaatgcaggaccaaagaagtcatagagtacatatgtgacatgtgtccctcatactaccctggtgcagtgctctgtcccagtactccaccagaaaagacaagaggctgtttctctttctattctgtaaggatgctacagcaagatatttgttcttaaagatgtaggcttcttcagtctcctagtgcagtgtttgttaaagtgtctgaaacactgcctcagaatcccctatgatgcttgttaaaaaaaaaatgtatcttctggctaggtgtggtggctcatacctgtaatcctagcactttaggaggttgagacgggtggatggcttgagcccaatagttcaagaccagcctgagcaatatggtgaaaccctgtctctacagaaagtgcaaaatttgccagttgtggtggcacacgcctatagttccaaatactcaggaggctgaggtgggagaatttacctgagcccaggaaattgagactgcagtgagctgtgatcacaccactgcactccagcctgagcatcagagtaaaaccctgtctcaaagaagaaaagcattttccaagaccctacatcacacatactatattagtcaggactcttggttggaagtagcagaaactgagctcacactaccttaagaaattgtataggcttatattacagcaaagtccaagggtctgtcgtcaggattgaatcccgagactcagtttatttcatcagggctccattcatctctcagatggacttgcactaaaggtggcaaagatggttactatcagctcaaaactgcagtggaaagggtgtgtcatttccttttaagctttttagtcctgggcaggactctgattagcctggcttggagtcagctcccaccaaactacacgaaccaaataggattgttaaggatcttgaaaaggtggtttcccaaagggatgatgggcaaacaaaacccatgtcacaactacagacagaatcagaatcactggaggtgggaagattttttccatattttaaacaaactctccagatgtttctcacactgaaattcatgaaccattggcttaaaggctgtgcgctttctaaattcagatgcattttcagcacacttaaaatgtgtggcaaactaaaagcattttgcaacacttctctcacaataaacagcttctcaaagtacttcatttactccctcaggaatccaaagaaaataaccgagggtaagtaaatatgagaatttctttatgtcatcccagatgaatgttcctattctgccgtctcatcattctgcagctgtgagttttttcagcatcctatattgcctttctggccttttctttaggagttctttaggaccttcttactttgttttattcacaaattagaatcactgaggtgaggagtgaaatgttgggatagtctttaagcctctcaagttttaggacgagtctcacagttgaaagaccacactttttttcttttttttcttttcttttcttttttccttttttttccccccgagacagtctcaccctgccacccaggctggagtgcagtggtatgattttggctcacctcagtctctgccttctgggttcaaatgatcctcccacctcagcctcctgagtagctgggactacaggcacacaccacaacacctggctaattttgcattttttgtagagacagggttttgccatgtttcccaggctggtcttgaactcctgggctcaagcagtcctcccatctcagccttccaaagtgctgggattacaggtgctgcgattacaagctactgggattgcagttgctggaattacagagtgttaggattacaaagtgctgggattacaggattataggccaccacgtctggcctggaagatcacactttaaaaacttactctagcataccaagatgcctaaatggattctgaaaataaaagaatggattaaaagcatgagtaactcccaattttcttcccactgtaatgttctyccacaatgtttatgtaactctcaggccctacatttgaatcaatgacagagaagttattacatattatttttctttagaagatatctcttctaggcaggatcaaagctttatttcaaggattaactttagccaaaatttgaggaccacagaccacatcgaatatatgtgtctataatttaaccttctatgaacctggcattgtgcaagtccctgaggaattcctagaagaagagccagaaagaatcctttccttcagagcgaacagatacacayataaagaactgatgatagcacacataagattgaagtgacctctaagaagaagaaactttttaagtgctatgagaactcttacgaaagacatggtgaagaagcaaccaaggcttcctaggagacatgacactggagctggaccttgaaggattttgatgggcagagaagagttttggaaagggccttccagtttaagaaagtgacataagggtcgggtacagtggctcatgcctgtaatcccagcactttggaaggccgaggtgggtagatcgcttgagcctaggagttcaagaccagcctgggcaacatggcgagaccccawctttacaaaaacaaatttaaaaattagccaggtgtggtggcacatgcttgtggtcccagctattcgggtggctgaggcaggaggattgcttgagctcaggagttcaaggctgcagtgagctgtgtatggcaccactgcactccagcctgggtgacggagtgagaccctgtctaaaaaaaaaggacagtgacataagcaaaggtatagggttttcaaagtctgtgttttcttaggtaaaggtgaatggtctgaatggtctggatggtttgagcacagagtgtgtgatggggaagagatgaggccaaaaagttaagtcaggaccaggttatgaatagccttgaagtccaygctgaggcaatgggaacttgattcgataaaacctggggacttcaggggtggggggcaaggggagggagaccaataggacaaatacctaatgcgtgtgggcttaaaacctagatgacgggttgagaggtgcaacaaaccaccatggcacatggatacctatgtaacaaacctgcacattctgcacatgtatcctggaacttaaagtaaaattttaaaaatcggctgggtgcagtggctcacgcctgtaatcccagcactttgggaggccagggcgggcagatcacttgaggtcgggagttcgagaccagcctggctaacatggcgacaccctggctctactaaaaatacaaaaattagccgggcgtggtggcgggcacctgtaatcccagctactcaggagactgaagcaagggaattgattgaacccaggagacagaggttgcaatgagccaagatcacgccactgactccagcctgagtgacagagcaagacaccgtgtcwaaataataataataaaatttaaaaaataaataagtaaataaaagaaaatatggagcaataggaatcctactctgcttgttggcaaataaatggatacaaccaccttttttttttttttttgagacagggtctcacaaaaaggaaaaaaataaacctggggagttactgttatgaaatcaaagtcagtcttttgacaccctgaagagctgagtagagaggagaacctcttgtagattgcattggaatcagccattctcctcttgctctttgggatttccaggcacctggctgaggtgtggagaatgctgtcggtggagcttcccagcacgacctggattctgtggaggctcctgaggaagctgcagaaatgccataatgagcctgcacaggagaagatggcatatgtggctgtggctgtaagcccttgagctttgcccctctaatgtcagcccctcccaggatgactgaccccacaccccagtggagagtgttccttttggtccctctcaaagcctgcatctgtcatccatttataagtctacagtgtttctgccaagggattgacatggagggagctggggagagtgaaggagtcagaatgccttaatacaaactcgtccaacctgcctttttttgtttttgttgttctgttctgttttgttttaggcttttagaagcctgaagccatggtatttagtttctgtctctagtgataagcggaaaagaggtatgaggaaggggctttattgacccaaccagaaacagaaactaagaacccatgactgtcatctgtcccttggaaacatccctggtttaatatgtttaaaacattccttccctcatcctctaaaaaatatgtatcatcatagttaaagagaaatgcaaacttgtgggaaaaaaacctcaaatatcgtagaactgtataaaacaaagtgcagactagacgcggtggctcacgcctgtaatcccagcactttgggaggccaaggtgggtagatcacctgaggtcaggagttcaagaccagcctggccaatatggtgaaaccccatctctagtaaaatacaaaaattagccaggtgtagtggcgcccacctgtaatcccagctactcaagaggctgaggcaggagacttgcttgaacccgggaggcagaggttgcagtgagccgagatcacgctactgcactccagcctgggcaacagagtgagactccatctcaaaaaaaaaaaaaaaaaaaaaggccaggcacagtggctcttgcctgtaattccagcactctgggaggccgaggcaagccaatcacttgaggtcaggagtttgagaccagcctggccaacatgatgcaaccccgtctctacttaaaatacaaaaattagccaggcatggtggcggccgcctgtaatcccagctactcaggaggctaaggcaggagaattacttaaaccagggaggcagaggttgcagtgagccgagatcacgccactgcactccagcctgggtgacagagagagtctcaaaaaaaaaaaaaaaaagaaagtgcagatctccctgagcagaagttggccaactttctataagagaccagatggtaaatatatagtctctgtcacatattctttggatttcttttaaacaatctttggattttggattttttaaaacaatccttttattaaaaaatgtaaaaaccattcttagctcatgtctgtaacaatctccctaaaaatgaattttccagaagtctttatacatatataaacttttggtatatctatttggtatacttttttcattttttccttttaaatactttattttttagagcagttttaagttcacagaaaaattcagcagaaagtacagcgttcccataaacctgcctccacacacacacagcctgccctactatcaacatttactttttactttattttctcccctaccagtttatggttcagctttctgtggtctaaattattgttatttttcttctttctttttttattgttttattttattttttttttgagacagagtttcgctctgtcgcccaggctggagtgcagtggcgcgatctcgactcactgcaagctccgcctcccgggttcacgccattctcctgcctcagcctcccgtgtagctgggactacaggcgcgcgccaccatgcccggctaatttttgtatttttagtagagacggggtttcaccgtgttagccaggatggtctcgatctcctgacctcgtgatccgcccgtctcggcctcccaaagtgctgggattacaggcgtgagccaccgcgcccggccttttattttttattgatcattcttggatgtttctcgcagagggggatttggcagggtcataggacaatagtggagggaaggtcagcagattaacaagtgaacaaaggtctctggttttcctagggagaggaccctgcggccttccgcagtgtttgtgtccctgggtacttgagattagggagtggtgatgactcttaaccagcatgctgccttcaggatctgtttaacaaagcacatcttgcaccgcccttaatccattyaaccctgagtggactaagcacatgtttcagagagcacagggttgggggtaaggtcacagatcaacaggatcccaaggcagaagaatttttcttagtacagaacaaaatgaaaagtctcccatgtctacttctttctacacagacacggcaacyatccgatttctcaatcttttccccacctttcccccctttctattccacaaaaccgccattgtcatcctggcccgttctcaatgagctgttgggtacacctcccagacggggtggtggccgggcagaggggctcctcacttcccagtaggggtggccacctcccggacggggcagctggccgggcagggggctgaccaccctcctccctcctggagggggcggctggccgggcagaggggctcctcacttcccagtaggggcggccgggcagaggcgcccctcacctcccagacggggcggctggccgggcggggggccgaccccccgacctccctcccggacggggcggctggccgggcggggggccgacccccccacctccctcccggacggggcggctggccggcggggggctgacccccccacctccctcccggacggggcggctggccgggcggggggctgacccccccacctccctcccagacggggcagctggccgggcagaggggctcctcacttcccagtaggggcggctgggcagaggcgcccctcacctcccggacggggcggttggccgggcgtggggctgacccccccacctccctcccggacggggtggctgccgggcggagacgctcctcacttcccagacggggtggctgccttgcggagaggctcctcacttctcagacggggcggctgccgggtggaggggctcctcacttctcagacggggcggttgccaggcagagggtctcctcacttctcagacggggctgccgggcagagacgctcttcccctcccagacggggtcacggccgggcagaggcgctcctcacatcccagacggggcggcagggcagaggcgctccccacatctcagacgatgggcggccgggcagagacgctcctcacttcctagatgtgatggcagccgggaagaggctctcctcacttcctagatgggatggcggccgggcggagacgctcctcaccttccagactgggcagccaggcagaggggctcctcacatcccagacgatgggcggccaggcagagacgctcctcacttcccagacggggtggcggccgggcagaggctgcaatctcggcactttgggaggccaaggcaggcggctgggaggtggaggttgtagcgagccgagatcacgccactgcactccagcctgggcaccattgagcactgagtgaacgagactccatctgcaatcccggcacctcgggaggccgaggctggcggaccactcgcggttaggagctggagaccggcccggccaacacagcgaaaccccgtctccaccaaaaaaatacgaaaaccagtcaggcgtggcggcgcgtgactgcaatcgcaggcactcggcaggctgaggcaggagaaccaggcagggaggttgcagtgagccgagatggcagcagtacagtccagcttcggctcggcatcagagggagaccgtggaaagagggagaggggagaccgtggaaaggggagggggagagggaaggggagaaggagagggagagggagagcgagaggctgttatttttctttttgagacagagtcccactctgttgcccaggctggactgcagtggcatgatctcagctcactgcaacctcttcctcctgggctgaagcgatcctcccacatcagcctcctgagtagctgggaatacaggagagtgccaccatgcctggctaatttttgtattttttagtagagacggggattccccatgttgcccagtctggtctcaaactcctgggctcaaacaatcctcccgccttagcctcccaaaatgctgattacggacgtgagccaccacacccagccttgtatatgtttttaattggccgtttgtatttcttttatgacttgtttgttcatgccctgtacactagtccttctcagatttaatatgcacacaaaccacaatcactttgggatattattaaaatgcaggttctcagctgggcgcagtggctcacacctgtaatcccagcactttgggaggccgaggcrggtggatcacgaggtcaggagatcgagaccatcttggctaacatggtgaaacaccgtctctactaaaaatatgaaaaattagccgggcgtggtggcgggcacctgtagtcccagctactcgagaggctaaggcggtagaatggcgtgaacccgggaggcagagcttgcggtgagcagagatctcaccactgcactccagcctgggtgacagagcgagactctgtctcaaaaacaaaaaataaaaaataataataaaatacaggttctgatatggaaggcctgggatggggcttgaaattctccctgtttaaccagctcccaggtgatgacaatgctactggtgtgtggcctaccctttgagtaatttttttactgctacgtaagagcattttatatagtaagaacaatatattgatacaaatacttctccaggttgttgccatctaactctttttttttgagacagagtctcgctctgtcactcaagctggagtgcaatggcacgatctcggctcactgcaacctccacctctaaggttcaagcgattctcctgcctctgcctcccgagtagctgggattacaggcatgagccaccacacctggctaatttttttgtatttttagtagagatggggtttcactctgttgaccaagctggtctcaaactcctgacctaaggtgatccacccgccttggcctcccaaagtgctgggattgcagacatgagccactgcacctggcctgttgtcatctaactttatgataaatgttgccctggctttatatttgtatgtagtcaaatatgttaatagtttccttcatgacttccgtatttcaaaatggcaggtgcttagttcctctctgtgtcttttccaccacaggcaacagatgccctttatgaggtgtttttgggaaacaggcttcgagcagctacgttccgactctttcctcagcttctcatgacactgcttatccagattcatcacagcatcggcctcaccatgtctgatgtcracatcccaagtggcctgtacacagaacaggaagtgccttcagaggtcacccctttgtggtactgcccatcattatttcattgacattaagtaacacgtactaagcactgggcactgtggtgaacacagggatagccaagatgtagtcccaactgaaggggagcttacaaccttcaaccctcatgagccatcaagatgaaatgcccaggaatcattctgagctttcattggctatctttggttttattagtaacaaggtaaatttggctatctgggttatatctgggttagccaaatgtgatattgtgttagccctttcctaataaatcaagtacagacagaaacaaaacagcctaaacctacctccaaaactgtactgatccaccatgcagtgatttctgctttctgttttattgcatggagagatatttttaagtcccattagagtctcagtagaaatttcttagtgttgttggttgggcatggtggctcatgcctgtaatcccagcactttgggaggctgagacaggtggatcacctgaggtcaagagtttgagaccagcctggccaacatgtgaaaccctgtctctactaaaaatacaaaaattagctgggcgtggtggcacatgcctataattccagctactcaggaggctgaggcacgagaatcacttgagcccgggaggcagagattgcagtgagccgagatcgtgccattgcactccagcctgggcaacagagcaagactctgtctcaaaaagtaataataataataaagacgtttcttagtgttgctatggcacatggatttctttcagagaaagtactataatgtgacatatttaagaacaccagactaagtcagtagacctgagttctagtgcagttctcattcatccattcaactagttctataccctgggcaaatctattgttctgtgcctcagtttccttatctataaatggaaaggtcaggcaaggtgatctcaaaggaccattccagctttattattttgttttattttttgagacagggtctccatctgtcacccaggctggagtgcagtggcatgatcatggctcactgcagcctcaacatcctgggctcacgtgatcctcccacctcagcctcctgcgtagctgaaccacagttgcctgccaccatgcccagctaattatttttattttttgtagagaaggggtctcactgtgttgctcaggctccttccagctttaagattctctgatgctaggtccgggataacagttcagtaagtagcttttaaaggcagtggacggccaggcacaatggctcattcctgtaatcccagcactttgggaggccaaggcaggaggatcatttgaagctaggagtttaagaacagcttaggcaatagggcaagagcctgtctctacaaaaaatttttaggctgggtgcagtggcccacatgtgtaatgccaacactttcggaggccgaggcaggaggactacttgagctcaggagttcaacaccagcctgggcaacgtggtgaaaccctgtctctataaaaattagccaggtgtgttggaacacacttgtggtcccaactactcgggaggctgaggtgggaagattgcttgagcttaggagattgagactgcagtgagcagaaatcgcgccaccgcactccagcctgggagacagagccagaccctgtctcagaaaaaaatttttttttcttaaattattggagcctgatggcacatgcctgtaatcccagctgccctggatgctgaggcaggaggatcacttgagcccaggagctcaaggctgcagtgagccatgatggcacccttgccctccagcttgggtgacaaaacaagatcctgtctcagtaaataaataaataataaaaacagtggagataaatagtgtggggtaaattgtatctcagtaaagcttttaaaaaagcagtgtgtgtctgtttagcatcccagatcatttcttttatcatagatttccttctaaactcctggggaaatgagacctagttagatttctttatgctgagatcttgtgtaaagggccttacaagttattagagcattaagactcttctggtctcactactgcacttgactagtcttgaaagtaggccgggcacggtagctcatgcctgtaattccaacactttgggaggccgagacaggcatatcatctgaggtcaggagtttgagaccagcctgaccaacatggtgaaacccagtctctactaaaaatagaaaaattagccaggtgtggtggcgtgcacctgtaatcccagctactcaggaggctgaggcaggagaatcgcttgaaccagggaggcagaggttgcagcaagccacgatctcaccactgcactctggcctgggcaacagagcaagcctccgtctcaaaaaaaaaaaaaaaaaaaaaaaggaagaaagaaaaagaagaagaagaaagtaaaagaaaaaagagaagagtcttttgggcaatttggaaagcagagaattacagtccagcagttgtcaatgcatgaccctcctcactgagaatgggatgactgtgtgctggtaagttggagggacctgttcaaatcacccacactgttttcgtttgatttagctttgccatgcaggctrcaaagactctcctcctcagaacatgctgcttgcaggaattcaacatcatggaaaagaataaaggatgggctctcctgggaggaaaagatggccatcttcagggactatttctccttgccaagtaaggcttccttgtcatgcatacacccacctgttctaaatcggcattgttttgagtatttatttcccttctagttatcacagcaactaaggttgaataacctccttataagagggtgggcaaatatccataatgctaggcaaatttttcagaggtcctggccctaccgtatactatcctgtagctgggcaagaacttctagagggtccccagccctgagacaatgccctctggatgggagcattcctgagagtcattctgttggtgttgtgttttgcagcgcattgctggaaagaaatcagctccttgcacagaaggtcatgtacttattagtccctcttcttaaccgagggaatgataaacataaactcacatctgcaggcttttttgtggaggtaagactcattstttagaagctggattcaggaagcctatgaagcagcaatccctgccttcctaggctacatcgagttagtggcatgttgggatctgtttcaagagtgagatagaaataattttcagattcaagggcaggcgcggtggctcacgcctgtaatcccagcactttgggaggttgaagcgggcggatcacctgagttcaggagttcaaaactagcctggccaacatggtgaaaccccgtctctactaaaaatacaaaataattagctgggcatggtggcgggcacctgtaatctcagctactcgggatgaggcatgagaatcgcttgaacccgggaggcagagattgcagtgagccaagatcgcaccactgcactccagcctgggcaacagagtgagactccatctcaaaaaaacaaaacaaaacaaacacacaaaaaagaaagaattttcagattcaagcctctcaaaaatcttctttccactcatgcataattcagtattctttgtgtacctatagggtaaataaacatcatcctgtatgttctgtaatagagatttaaaaggaaaatatgtactttagcattggtgggaaggtagctccccacatgaaaaagggcttaaaggtcattttttgggctgatctctgggttctttcagcttctccggagtccagtggccaagagactgcccagcatatactctgttgcccgctttaaagactggctacaagatggaaatcatctctttagaattctcggcctgaggggactgtacaatcttgttggacaccaggagatggtaggaggggcccccagaccatggattcttttcttttcttttcttttcttttcttttcttttcttttcttttcttttcttttctttctctttctttctgtctctctctttctttctttctttctcttccttcctttctttctttcccttctttctttcctttttctttctttccttcctttcttcctttccttctctttcttttcttttctctccttccttccttctttctttctttttttttttttctttttttaagatagggtcttgctttgtgacccaggctggagttcagtgacaccatcgctgcgtgccgcagcttcaacctcccgggctcaagtgatcctctcacctcagcctcctgagtagcggggaccacaggcacatgccactatgcccagctgatttttaaaatttttgtagagacagagtctcactgtgttgccagggctgctctcgaactcctggtctcaagtgatctgtccacctcagcctcccaaaatactgggattacaggtgtgagccacagcgcctggcccagatcactgattcctaagataccaattaatcaccccaaaataatacctaagaaactgaaaatagctgaagacaattgggtagcctggggacaggagtaggtgggagagggtcttttttcctgcacatccttttgtatcatttaaagttttatgcctaagaaataggcaagtactgactatttaaaaattaatgaaattggccaggcgtgatggctcacgcctgtaatcacagcactttgggaggccgaggcgagtggatcacgaggtcaggagtttgagaccagccggaccaacatggtgaaaccccatctctactaaaaatataaaaattagctgggcatgatggcacatgcctgtaatcccagctactcagtaggctgaggcaggagaatcgcatgaacccgggaggcagaggttgcagtgagccaagatggcaccactgcactctagcctgggtaacagagcaagactccgtctcgggaaaaaaaaaaaaagttaggccaggcacggtggctcacgcttataatcccagcactttgggagccgaggcgggtgaatcacctgaggtcgagagtttgagactagcctaaccaacatggagaaaccccgtctctactaaaaatacaaaaaaattagccaggtgtggtggcacatgcctgtaatcccagctacttgggaggctgaggcaggagaatcgtctgaacctaggaagcggaggttgcagtgagccgagatcgcactattgcactccagcctcggcaacaagcgygaaactctgtctcacaaaaaaagagaaaaaaagagttaatggaattaaatgaaataaataaaaagtccaaattatatatattcataatagttgatagctgcaatttgcaggggaggtatactcattatcacaacctggacagcatttaggtattgttttatgccttgtaccgtgttgccccatggagtagattgaaaagaccattgatatgctcccaagatgcttgtcatctaaaaaaaagatcactgacattcatgttggaagaaagctcatcttccataggcctggtgagaaaactaagcctaagccagaagacatgaggaatttctgaagcttcagttttgtcactggagttctattctttttttttttttttttgagacagggactctctttgtcacccaggctagagtgcagtggcacaatctcggctcgccgcaacctctgcctcccggcttcaagtgattctccaagtctccaagtcccagctttccaaatacctgggactacaggcatctgccactacacctggctaatttttgtatgttttagtagggacagggtttcaccatgttggccaggctggtctcgaactcctgacctcaagcgatctggctgcctcacccttccaaaatgctgggattacaggtgtgagccaccacaggtggcttggagttctattttatttatttatttatttttactttttttttttttttttgagacagagtcttgctctgtcacccaggctgaagtgcagtggcacaatctcggctcactgcaacctccgcctcccgggttcatgccat

SEQ ID NO: 95732 - DNA, 89371 bp, Homo sapiens
  misc_feature (1)...(89371): n = A,T,C or G
gaggctgaggcaggagaatggcgtgaacccgggaggtggaggttgtggtgagccaagattgcgccactgcactccatcctgggtgacagtgagactctgtttcaaaacaacaacaaaaaagaaaaccactttaccactgtcacacctaaacaactttgatacaaacttatcaaataaatattcagtgtttaaattcagttgtctaatttttttctccccctgatggtttgtttgaattagaggttgatccatgcaggcttgacattctcctattaaaggaatcaactgaagaggtggccggccaccccacctctgtaggcagttgggctggggagtatctgtcgtttacttatgggacttaaagcgactaacaagaaaagctagggtacaaggtcgtgtaaatgaaaagttacatgaaggaaacccaagggtgagggataaaaagtggagtctggaatgaggcttgaagagcccgccatgacatacacacctacttcatgaggccacacgtttaagctttccaatagtgaatacagagaagcctggtcagatacaccattcgcagtgtccttaagattaaagtaaatccagatacagaaaggacagttattccccacggtggcatatgcctgttgtcctaggtatttggagggctgaggcgggagggtggcttgagccagaaaggacgaggctgtagtaagctgtgattgcaccactgccctccagcctgggtgatagagtgagaccctatctcaaaaacaacaaaattattccaggcactaagataatttctttcaaggatctttttataaaaacgatacttataaaaatgacattctggtaatcacattccgataataaacaatgacagatactctggggcatgcccggaccctgaactctgcagaggcagttgtctgaagcagtaaatgaggtgaatgtattcaggtgtattctgtgagcatggaatacataccttatgttgaatatgtttagatctacattgttaggctaagtttacacacacacctagatgtatgccccagtttgcctggcagagttccagttgatgcctcttatccccaagtcccatctggttaacacctccttttattctcaaaagtgtcccagtttgaactataaagtatataggcatcctatatagaaagcacctcgcagacctaaggaggctgtccccagttcacccaacttcattgaattgtgtgtccctcaggccaaagaaacagaggctcctctggctgcggaatcctttccagtggatctttccacaactgtacccaaatctttgaagctgcgtcagcacttttgcttatgctaataactgtgtgaacgtgatcatttgtgtgcaaaccaacaaaccagacaggtttacatatgttacagcaagttgtggaagactgcaccttagactcttgggaaaatcctgatataatgcaatttagtacagcaattctgtaaaggaccaccacttttcagtctggggatggctgcctgttgtctagcttgatggtggcaaccaaagggcagttagcgtttctcttaggaagctaacagttgtagcgggttgatacatggatggttgtaatggacatctattatttttgcttcattcattcaatcattcatcctctggtaatctcacgctcagatttccctctgaggaaccgttctgttcccagctttcagtccatgtgtttctgctgaagctgacctaacccgaccctggatgtggaacatgggaccaaggcctaagtccattagtacattagattcctgggcttagtggttgatttagggatggatacatggcctgtcaggaatacgttgccaaggaattttggaaagaggtttaatgcttaagaggatgtggtggctaaaactggcatggccactttgttaccacgttacgcctgaatcagcagaacgtggatcaatatgatcagaaagaatcctggttatgtggtatgtatcctgatgcagctgtgtctcaagtcagaactactcttggacttttcattttatttttatttatttattttttttggaggcagagtttcactcttgtcacccaggctggagagcaatggtgtgatctcagcttactgcaacttctgactcccaggttcaagcgattctccagcctcagcctcctgagtagctgggattacaggtgtgcaccaccatgcctggcaaatttttttggtattattagtagagacgggctttcaccatgttggccaggatggtctcaaactcctgacctcaggtgatccacccccctcagcctcccaaagtgctgggattataggtgtgagccactgtgcccagccagactttttagtttatatgagccatttctgcttaagagaggttgggttgggttttctatcacttatatccataaaagtcttaactggtacaaaaatgaaaaccctaaattctatgccttcctgaacatggtcaataggtttagtctggaaattcaaagcaaaaaataccctttatcataggcacagaaaaacttccatattgtaacacgattttgaggaacattatctttctggaaagcttatcatttggaagttgcaaaatacacctttatgtaacaaaatgattagacttttatggaattgttggcaatcaactaaataaattctggatgccatctcaagaaatatcagttttaatttcagagcagttattttagcccattctttctgaaaatagttaattaggaagactaagaatctgttgagaccattcctagtttgtggaaataaaaccacaacatcaacatgcaggttattacttaggtattttctctaacagtagtctgtgtaggcaaaataaccccttggggagagttggactttgagaactttctaaggcagatgaactaattttcttccaggagagtgtagctctaatgattttaagtggcccatgtagttgagcaaacactggcctgggaattagaaagcccgagttctagttttagttctgatactaaattaactcattgattctgaccaagtccttttaacttctatgtacctcagtttcctataagacaagaaattcaggctaggtgttaagtatggtctcctccagctttaagattatgatccatgagaccagcctgaccaacatggggaaactgtctctactaaaaatacaaaaattagccgggcatggtggcgtgtgcctgtagtcccagctactagggaggctgaggcaggagaatcgcttgagcccggtgggtggaggttgcagtgagatgagatctcgccattgcttgccagcctgggcgacagagcaagactccatctaaaaaagaaaaaagattatgatccaataatacaggcatggccgatttactgtctcttcataaacaggaaggtttcattatatgagtaatagataaaatagataagttattttatttatttttttttctattttttgagatagagtctcactctgtcgcccaggctggagtgcagtggcggatctctgctcattgcaacctctgccttccgggttcaagggattctcctgcctcaccttcccaactggctgggattacaggtgactactaccacacccggctaatttttttgtatttttagtagagacagaatttcgccatgttggccaggctggtctcgaactcttacctcagttgatctgcctgcctcagtctcccaaagtgctgggattacaggtgtgagccaccgtgccaggccatgaaataatcttaaaagtggcatttatttcattttgccttatattcatgtataaaccttggtttccgtatttgggctgttagtaaaataagacaaaaataaaacaaggaaaaatcaatgtcatgaagaactaaaactaagcctaaagcatgatgtttatctgtatattactcaataggcactgctactgggctacgaatgtgaatgtgccatggtcctcgtcctcagtaagttccctgtgtaatagtggcggcaggtaaaccacagatcaactaaaactaagcctaaagcatgatgtttatctatacattactcaataggcactgttattgggctacgaatgtgaatgtgaatgtgaatgctgacatggtccttgtcttcagtaagttccctgtgtaatagtggcggcaggtaaactacagatcaactaaaactaagcctaaagcatgatgtttatctacactcaataggcacttgttactgggctacgaatgtgaatgtgacatggtcctcgtcctcagtaagttccctgtgtaatagtggcggcaggtaaactacagatcaactaaaactaagcctaaagcatgatgtttatctacactcaataggcacttgttactgggccacgaatgtgaatgtgacatggtcctcgtcctcagtaagttccctgtgtaatagtggcggcaggtaaactacaggcaactaaactacaggtcacttttctcacaaaagtgagaatacagttcctagactacaagggggaatgtttaagttggatagataatttagagctagccctttaagggataaagataatttaaaggatggatggagaattctaggccgagggactaacagatattgagtccctacattaattactataaaaataaatcaaagaagattcttacatgaacctatgcaggtaaattcagatttttttccccctggtggatttgctctgagttgaggtaatgagagctaacattgattcagtgcctgctatgttttgcactgttaggtactttacatgttatctcatgtaatacctctttaaacctcattttacaactaaaattaaatgacagctaggagctaggaaatggcaaagttacgattccaagtctggactggttgtccacaaaagcccctgctcttgccataatgatgccacttctttcaaagaattcagaattttcttcacagctttaaaaatgcatagattctgaagcctctcacttccttccaattagttgcctacctagaaagttatttcctccacttgagctcatcaccccttcttagcgctcctttggattactgtaatttctttttctttgacctcacctttcgtctgatggattagtgtaatctttcccaaatttgttaatctgaagaattcaggagcttctcaaaatgcaggttcccaagccatgctccaggacatcgattcagaattggatcaaggcctagaatctgtgtttttaacaagcatttgactcaagggtatcaaattggaggaagcactgagttggtggactaccttaattgatctacccattttcagtctcttctgccaacccattcgctccaccccacccccagtccgtttttccgttttgccctcaaggtccctgaagacttccatatcatttcgcattgttttatttggggcactgtgccgcactacctgggcccacagcaggcgcgcaatatttactgacaaatacaacccacgaggtagttcctattattacccttcaatttgaaattgagaataaaacagaagtcgacaagttgaggtagcttgtgacatcagtatttcgtatttaatccagaaagcactgcttcaacgcccagtgcgtgcaaggttccactctcgggccagcggtcctctcccaaagcccgttcttcctaagtgtgcggccgccatccaggacacgccacgctcgtaaaaggtcacctgaagcatctaccctccacgctcaagaggtaggcggaggagcgcgcccttttctccaaaatggctgagcagggtcacgtgggctcgggggcggggccggtgcgctcsccggagcctggaagtgggtcacgtggctcagacgggggcggtagctgtgggggcgtggccgtcacacggcgcgatccgtctgggcagcggctcttcgggggccacgccctccgggccctgggggcctagcgcgcgacggtggggtggagctagcctcgtgaccttttaccccaacatggctgcgcccgtgggaccggtgaagttctggcgacccggtaaggcccttggtggaacgctgggcagatgcggcggcctgacttcggtcttggcgccgcggccggcgccctggggccagcagacctgctcgcaggcctgacctcggygagctgggcgctgccgcctctgtgcsgggggagctctggytcaggctccccagtggtcccgagggatttgggggtgctcccctagcgtgagcagaaactctttgtgaccttgttaaagtggtccagcctcctcaggcctcgtcttcctcgttactgatgcttgtcctgcccaccccgcgagatggggaatcctaaagctcccyctcgtgtctcgttagcgccctggggttgcgctgtggcccgacagacaatgctgctcgctgctggaggcttgcaagcccaagttatggagtcagactgtccgggttcgaattttcgtctctgccttgtagtagggtgaccttgggcgagtcacttaatgcctctgagccatgacttctttacctgtaaagtgggcagaacaatagcttctatgctgtgggcttaaatgacaagcagaacgcgttgtcagacttagaataaatgctcaaaaaaagggaaagtgtgttattttcttttaggataattgttgtccactccgaatgtctactagaaaagggaacagtccttcatattggctgccagccacttcctctcttacagactaacacgaatcacaatcacaaaatgctttacttgttttgtcttgatatttactcattaatcaggtttttactgaatgtgcatatgccagaccgtactagatgcattacttcctctctgcaaacagtttcttgtaaaaaacaaaagtttttaaattacagctaccagcttgatttttttctaccacctgcacccctgcaggtctggatgtgcaaagtatattgcagcaaaaatgaaatgacaccaagaatgtaatataagcaaagcttttaatttttcagtggttctctgaaattctgaccatgcatataagtgatgtgagagataaacccaagcaagagatatgtttaatgctttttaaaaatttgtagtctgtcacttgacagttttatggttcagcatttcaagtcatcagccaattatccatcctgagttttatttgcatccaaaactaggaacttactaagtaatgaatacttttaatttattcacgcttttagtaacaggtgaaagtgttaggtataataaagagctgaattaattgtttgaaatcagaccagggtactattttggttaaagaacgtggaattactcttaagagttctatttcattatttagttcatccattgagggtacacttattgaaaacctaatcctgtgttcaggagacaaatacagatgctcagggctctgctctcaagttactgtctctctcttaattgaatataaagttagatgtcctctagaagagattttacaatgagacagagtaaggtggtggtaaagaagatgagctctagagtcagactgcagtgcccatcatgtctaccacttactaagttgatgacttgatagtcacttaaattctcaaagtctcagttactccatctgtaaattgggtataatacctaccctacccaaagtagtgttgtgaggtttaaatgagaataacacacaacaggatcttggcactagataggttactattataattatatggaagtatggaagagggagggaaagttgaatgtatggataagaaatacttcattaaggtggtatttttggagtgaacattaaaggatgaataaggttttgtttcatagagaaatggaactcgaagcaaagggtgcagcatgaacaaaggcagaatgggatttgtgcctttagaatgtccagaaagccaaaataacagagcagtgtgatagtgttaagtgctagggtatattttggggtatgacaggagatgaagctagaaaagtaggtaagggcctcattgtgaaaggtcttcatgacaagttaaaaagtttagacttcactgtttttttgttttctttcttttttttttttgagatggagtctggctcagccgcccaggctggagtgcagtggcgcaatctcggctcactggaacttccacctcccaggttcaagcgattctcctgcctcagcctcctgagtagctgggactacaggtgtgtgccaccacacctagctaatttttgtatttttagtagagatggagtttcagcatggtggccaggatgatctcaatcttttgatcccgtgatctgcccacctcggcctcccaaagtgttgggattacaggcgtgagccactgggcctggcctgacttcagtgtttttaagcaggaacaaatcaggtttactttagaaagataacactggcagtggagtagagagtggatggaggaggaaattagagaaggtactagtgaaatccaggagggatgttaaaaaccttaattctgacctgggagcttagaggaggtgcctgttggagagacattttagaggaagatgtgggagaagatgaagtcagtaataactcagatttctgggctgggtgactgtctaggttagtgattctctaattttgctttatagttgaatcacttgggaagctctgaaaagtcctgatgtgcacttgcacctcacaccaataaattagaactttggaggcctaggagccaggcatcagtgttttttaaagtctctaaggaattccagcatgcatcaaaatttgggaaccactggtctaggtaaattgtgttgtcattagttgacatgggaatagctttagtacacagttattgggccgttgctttgtgttagtcactttcatttacacatcttattaaacagtcacagtatctctgtgatgacagtaatactcttattttagtgaggaaattcaagatatgaagtaggttgtgggaaatgcaaggtgaaagtcagggaagctgatataaggctagacattcaaatcatgaacatatcctgtaggcctgagcctgtgattacagaggtctttcagacagtctaagtgagtgaagttgcttactggaggtaatagggagtggtggggactgtggcagagtgtgcatacactggatagtatgtacagtggagatctacagtagagcttacatatgctttctaaaatagggagttgtactcaggtccacctaattgttatcatatgggttcagagttgcccaattttttttttaagaagcctaatatccagatctgaatgggaaaattttatgtgttgttttaaatgaatgatttaaaacattttaacaatagcatgtctgggtaccttaagatacccatttgtggtgtctaccttaggagtgtgacttaagggccttgtatgacctgcctgagagttttctacaaaaatcttttacttaatttgcaagtacacgtggatccgaagggcctgcccattttcgtttgctcatttgataaatatttcatgattgttgaccatgtgcatgacgaaaactttacaataggttttaagctttttttgacttgacccacagtaagatatagcacacatacacaactgaagaaaaagttgttcataaacagtattgctttctggaatgtgctctgatgctttctattctatttcattatttaaaaagtgctggtatgacatactacattgatttcataacccactaatgggtcaccagtaaaatttttaaaaaccaagttaaagggaatgaggaattagggatatcagccttgttaagatagggaaatgaagatgttcatagtttgcaaaagttataaagttgttactcccttaagcatagagcgtacgctcaaggaaaaatcaatcataggcagccacagaggggtgtttatagagggaaagcagccctgatgttctggtttggttgaaggaagtcttttatgaggagaaggtatactgtttatcaactgacatagctgttcttataaaagagctcagctgggcgtggtggctcatgcctataatcctagcacttcgggaggtcgaggtgggtggatcaccagaggtcagaagttcgacaccagcctggctaacatggtgtgaccctgtctctactaaaaatacaaaatgagctgggtgcggtggtgcgtgcctgtaatcccagctactcgggatgcccaggcaggagagtcgcttgaacctggaaggcggaggttgcagtgagctggcatctcrccactgcactccagcctgagcaacagagactccatctccaaaaacaaaarctgataatagaagagatagattggggctgtaggttagagacaagggaggaatacggtagtacaaaagacatgttaaaatattccagagaggatatgaaggtttaaaacatgatttgaaaaggcaggaattcaggacaaaaacacagcagaaaaggataaggtattctttgtcattgttttcttgagtaacaattacaaggaattattaagatgtagtgacaagaagggaaggaaagaaagcctgtctctttgaggacaggcattgttccaggtcctgttccatcttttgtcttgttgaaaggaaggtcaacattttggcaaaagcaacatgacagtgccccacttacctgatttttggccatcttgaacctctgaaacacaactctgttcctggaagtaaatggaaaagggtcagagatctaaagcagtgattctaaacttagctctagggggtctacggaccccccgaattttatattctggtaaattctggtgtgttttttaggagagggagttcatagcctttatcagattgttgaagcaatctgagaaccctaaaaagtgtaaaagtaagtcactgagctgaatattcttgttacaaagctcctgtgctttcacttagcatcacagattctgagttcagaagacctaggagatgatggttattggttattatcactgtagtgccccagcaggaggctgtatagcatgtgtttgatctagggaggatttttattcatttacaaggcagcaaactccagtgctgaaaagtgtgaccttttggaaatatcttccttacattgagttgaattctgaaccctgtgtcatttacttattactcctagttctgtcctagagttacagcagcaaatcagcatgaaaagttatggaagctgctcacaaaatttaaagttatgtttctcctgagttgtttttctgtttgagctaaaactgtatggaaccttcaacaggttttcatgatgggatatggcttccctattcttcaccatcatgatcaccagtttgtcattgttattagcaagaagccggggtgaagatctcttgtttaatctgcccagcatggcggttactgagaatagcatttcccatctatccactcccgattccatggttccaatggggactgtcatttacctcatcccattccactggccatggttgattgtattggggtggggattggacctaagctgggagaagtcagtccctgtctgtccagtataaaagagcctcccccaccccccattacaacacatacctgggactcccagtcccccttacgttgtctttatttctctccatagcacttatgaccacttcatgcaccaagttactttccactgagaggaagaattaaaaaagcaagtgagctccgtgagggtagggctggcatctgtattgttcactgcagtgtttctagtgcttagagtggtacgtgacatggagtgggcccttggtccatccttgctggtccttgctggaccacgatgaatgattggtagaggagttgtaagcgtgaaccctggcactgccggcagccgtctttccagctcctgtacagtagccaacctaaggggctggaaggaacctgcaagacgtgccaagatgagagaaggagaaagccatggctgctttgagtgcccagtttctgtcatctctgagccttattgccatcctacagtaacaagattcatccttttacctcagctaattcccactgggtttctttcacttctgttaagaattcagtaataacatggacatggaggccagaagtaaagacactgtgctctgtaatacacagttctgagtggccaatttggagcccagtgggactgccatctcgtttcttttttctttttttttggagacagagtcttgctctgtcgcccaggctggagtgcaggggcccgatcttggctcactgcaacccctgcctcctggattcaagcaattctcctgcctcagcctcccgagtagctgggactacagacacacaccgccatgcacgcctggctaattttttgtattttagtacaggtggggtttcaccttgttgcccagactggtctctaacccctgagctcaggcaatccgcccgcctcggcctcccaaagtgctgggattacaggcgtgagccactgcacctaaccctgtcttgtttgtttttgacactgcagtgaagcttttagggaagatttttagttcctcgtaggcacttttctggattctttcctaaagttaaggttgaatacctttgagtagtttgagataaaaagtattgcttcttctgtatatcttcatctttgaaagtttataaacttaacacctttttctgttcattgtatcagagaatctgaaaaaaaaacatttctgctgcaggtacagaggggccaggtgtaagcatctctgaagagagacaaagtctggctgaaaactctgggacaacggttgtttacaacccttatgctgccctttccatagagcagcagaggcagaagctgccggtattcaaggtacgtcaaataatcatgttcaacctgtgggcttgaatcgtgtgtctgcattagctttatgctcagcactgaagggaatgatggcctctttctagaacacagtgagctcagagaaacccttactgtaagggatgacttttcatactgtgtattttttagttaaccttataaatcttgaaagtccttaagattttttcagttgcatcgtacatactggaaaactggaggaattagaatgacttttgttttcccctttattcctttcagctgtggacaatttcagatatacagaaaagtagagaaaatagcagttaatttctatataacagattaccaacatatggccaatttttgctttatttttaaagtcactcctttaaacaagtttaattgggaatatgaggttgtttctgctgaagacatcagttaatactctgacttcctctgagacagtgacaggattttggtatggttactacttaccaagtgcacatccagacactcagttttattagcgctcacgaaacagatgtgtgctcagctacaagagaccaaagtgcaaactagaattcattcagaactgttcatttatggctagcaataattctccagtacagatggacacagttgacatatacactttgtccctgttggcacatccacatgggaagccaaattgtaatcaggaagtacagagccaagacaggttacagaaatgtcatacagcccctgatgaggggtgaattctccctgctccacaggatgcccttggaatgacccgagtaggtgtggccaccagcatctgtgtctctttctttctcctggacggtgctgggtgaaagttgctgtgttctatctatctgtctgtctgtctgtctgtctgtctatctatcagacagggtcttcctatattgttcaggctggtcacgaacccctgagctcaagcagttctcctgcctcggcctcccaaagtgctgggattacaggtgtgagcagccaaaaggtgccaagttcttatactcatggagttcttttgactagactgtgctgataattcctcttctattaatgtgttctttctccaaayagataggcaacagcagccttcttaatttagccagattgccttacttggagttttatgtggctcccaatattttagtcacaagtgaactgactgtctctgggtttcttcctcaagtgactaacacattcactatgtatgaatgttagcaagtttgactttcaggagatgaaatgataggtttactattgctttctcaccactgagggacagtttgagctgtgatgaagtgtccggactctggagctagacttcagggttcaaacccaagcttcaccatttgtgtgctgtgtgacctcacttctccattctgagcttcttttctttatctgtgatgtaggactacaggagcacctacctcataggactgttatgaggaccagatgagatcatccatgcagagcatttagcaagatacctgacatgtagtaaatgctcaagtacaagggaaattactgtttactcaagtatttaaattttggccttttcttgactattctttgtctcccaactgtacttacaagataacataaatgaaacagcaaatgaaaaaaaaaaaagcaacaagaagttaagaaatgtttatgaaattaaaatggtaagaagaagggtgtaagttactgatataaagcaaagcagagtttaagtacagttgagatcttataagatgttgaagatgaatcgagacaaaaaggaaaacaagttacctctacgccatcctttttccctttcaaacaaaaagtaaaagtagctttaaaaacagaaattggaggctcggtgtggtggcttacggctgtaatcctataggctttgggaggctgaggcgggtggatcacttgagacaaggagttcgagaccaacctggcaaacatggtgaaaccccatctctactaaaaatataaaaaattagccgggcgtggtggcacatgtttgtaatcccagctacttgggaggctgaggcaggagaactcttgaacccgggaggtgggggttgcagtgagccaagattgcaccactgcactcctgcctgggcaacagagcgagactccatctcaaaaaacaaaacaaaacaaaacaatgttggaactaaagcatcaagagattgttaaagatcactgcctcttccccagcaccattatgaggccacctgttcccttgtctgccttctttaggctgctgtatagacaatagtgactctatcttggatgcaagtctgccatgttcacttctgtttagacccagtcttataaatgcctcctgatttctgctttgtatattgtccttagtgtaagaacatgtcaacctctctgggggcagcactattgacagcttcttgttttgttttgtttttccccaaaaacagtctacgcataaacaagtagatacgtgtttgccctaagaagaatgcagttactagggtattattcacactgttctacatctcacttccttttcttaacatatcttatagttcattccatatcagtacaagtagatatttcctcttcttaataactacaaattattccattattggaatattttatgactgatttaaccaaacttttgttgatcaacatttaggctgtttgaatttttggctattataaacaactctgcaatgagtatgcttgtatttatgtctttgtacacatatagtatgtagcagtatgtctataatttcttgttttttttgttttgttttgttttttttttttttttttttttgagacagagtctcaccctgttgctcaggctgaagtgcagtggcatggtctcgcctcactgcagcctccccccgcctgggttcaagcaattctgctgccttagcgtcctgagtagctagtattacaggcactttccactgcgcccagctaatttttgtatttttagtagagacagggtttcaccatgttggccaggctggtcttgaactcctgacctcatgatccacccccggccctggcctcccaaagtgctgggattgcaggcgtgagccacctcacccggcctataatttcttataagtgaaaatgtaaagggcgtatgcattatgtattttgataagtgttaacacgattgcagttgtattcgctcatactgagaggarcagtacctgagggttagaaatacattttgatagytctacttaaaattcactttcctttgaaaacagctcatttcacaatgtttaaatatcgttgtttaggtcttttgagacaatgtatggctatttgcaaggtgtgttattctttttcagcttaggaatcatattttatacttgatagaaaattatcagacrgtggtgattgttggtgaaacaggatgtgggaagagcacacagattcctcaggtgagtacatatttaataagtgtctttacacttcgatttggctggaagaattttgtaacttgagagctctctttactatcatttacatttttaaggtctcctttcaggaaatgttcacttcaactagatattttttattaaacttttagggcttataatttctttggtgagtactaaagtaacagtttgtcttcgatttattataattccaaaatagtaatggaatggccatcttctgaaagttacaatggagatttattcaaagatgtgaaatatagagtttttatccttaaatagttacagttgaaggggtggggtaaaatgaattttgctgtagttgtaaataaaaattggctgttatagtattatgcagtgctatggaagaaccctttcttactaggaaaaatcctatgtgatgtggataggagtagaaagaaggatcaagaaaggccttgtaaaggaattggcatttgaaattgaccttgactgggagctgactgagaagatattccaagccagtgaatattgtggttagaaatactggggtggagaagtgtagggtgagttcagagtgtgtcttaagaaccttaacttgaagagtgaagactgactgagcttgagagaccttgcaggttcttacttccttttttaatgttaattttcttgaggtatgacatatatgtaggaaagtacctatatcataattgtacaccttgatacatttctgcaagtggaatacatctgtgttaccagcacccagatcaagaagcagaacattaccaaaacctcaagaactcttcttctgtgttctgttctcatctctaactgccatgtctgcttacccctacaatcatgaacacaagggtagctcttattctggctactaacctcataaattagttttgcgtatatttggaattttataaaggaataatatagctgcttttgtccaacgttatgtgtgagtcttccttggtgttgaattagttgcagtttgttcattctcattactgcatagcagggttcggcaagtcacagccagtgkgccagatgcagcccgctgcctgttttgtagagaaatctttgctggcacacagccactcctacttgttgatatattgccggtggctcctttcaggctaccacacagggttgaacagttttgacagagaccctacgatcctcaaaacctaaaaattaccatctggccctttacagaaatgtaaaatgtaatgctaacccctgctagttagtattccactctatgagtattctgtggtttgtttatttttcctgttgttactgacatttgagtcattcctagtttttagttatggatagtgctgctgtgaacattcatgtgcttgtctttggtgaacgtatgtgcacattctcctgctgggctctacctaagagtagcattgctggatcctgtgttcaactttagtaaataatgtctaagatattcaaagtggttgtgtccttgtagggtttgcaagcaagtaaacaatatgacaagctgagctttagataaatgattatattgagatataaggtgacttagaaactggaggaggcaggccatagaaagctattgcagtggtctagagaaggatggtgtaacggggtcctcaaccaagaggtgatagtgggataatctggtgaggatgggaaggagaacaatttacaattttagcgttagggtctgtagacattagaaacttaggttggtgcttttgcaccaatctaatagatggatatttgtgatgacaaaggggaagggacaaaggtgcacagtgactgatcacgacttgctgccttggcgaacagtgctagtattaaatgtgatagaaaagtaaagattgtttttttgaggggaaattaatgtgtgtgtttttaaacatatttattttttcctatattattgatggcctttgatgacattagcaggaagtttggaatgggaatctgaagcttggcagaggtcagacgtagaaggtgtggacatagggattgaacatcctgatacatgcaggaaggagatggaacagaaataactgagaagaggattaaggacaaagtccatggagcatcaacattcaggagtcaggagcagaaaggagatagaatggcagccagggaaatgacagaggaaccagcagactcttcatggttagagaaagcaaagacagagtgaggtttctggagaggtgggtaggtggcagtttcagccaacagagcggccagggagcaggagaactggttcagtcctgggttattcatcttggagatagcacgtccagtggtagggttttagggttaagggtgtctaagggtaagatgataaaaatccctttgcatatttgaatatgttaacaatgtgttgttgactgtttggtccagacttgtggtcatgccaggatctgtgtagatctttttttttgtctgctccccaactccattttgaataatgggtttataaataggttgggacccagatgtaggtatttttttaaagtttcccaatagacagctagggaaaggtagacagacctagtaaaggtagatgacctagtaaaggacaacttgaaatgcatgcagcagaggaaatggtggcctggaggaaaaagataaccgtatatgcagatggaattgagagcctagtaagttactcatttcttacaggaagaaacaggagaaaggttaaattactgtgtgattgtcatttagagagtaatataacaatagtataacaagtaataacagtaataagtgctacataaagtgattttacacatgttgatctgtttaatcctcaatgaccctatgaagcaaataccattattatcttcattttataggtgaggacactgtagagagtaatgaggttatggaatatagaacagaggtaaaagaccacatgatgttccagaattgtttgggaattagtctgtgacgttatgtagtcagcttaggataaactatgttctggtaacaaagaacctgaaaatctcagtggcttaaaaacacaaaggtttatttcttgctcatactgtgtggttatcttgggttggctttgagattctatcacatcatcattgggccttaggctgatggtactgctcttatgaggcacttgttgatcttgtggtagatggcagaatcatgagacagctcttaaaacttctgaccaaaagtgggccttctgttcacatttcattggtcaaagcaagttatatggccaggcctgatagcaacggggtgacagtgtatataatcctcccatagggatgggtggcaggtatttggaacaatgataaatatatcacagtgatttggccatttactcctgcaaggcttagctgccagggaacagagagggcctgctgtgttactaagtccagggaaagctggtgggaaggagaaagagcagaggctgaggatctaggctgggtaatgtgggcaaacaaaggtagtttttttttcttttaattttaagatttgaatatttttaatatttttgaacattaataggttcacatgatttaaaattcaaaaggcacaaagggacatacaaagatttccttctgccctgtcttcctggtacccatttcctttgtgcagttataatcagtattatgagtttcttggtagaaattttttcatgcatttacagagaagtgtctgtgtgtgtgtgtgtgtgtgtatgcacatatatgccctattttaaacatgaaacatctatacatgttttagtatgccttgacttttttttttttttttacttattctttcattttaaaaaaaaactgttttgaattgacacataactgtgcatatttatgggatttagtgtaatgttttgatatatgtatatgttgtataatgatcaaatctgggtcattatcatatccatcacctcaaacatttatcatttctttgtggtgagaaccttcaaaatctcccttagctattttgaagtctatggcacattattrttaactatagtcactctgctgtgcagtagaacaccagaacttattcctcctatataactataactctgtgcttgttgaccaaccttttattctccctactccctgttcccctcttccctctgcagcccctagtatccactgttctattctctacttttgtaagatcaacttttttagattccacatgtgagtgagctcatgcagtatttgtccttctgtgcttggcttatttcacttaatatcatgtcctctaggttcatctgtgttggcgcaaatgacaggatttcattcttttttatgactgaatagtattctattgtgtatatatatcacattttaaaaaccagttcatctgttgttggacacctaggctgattccatgtctcggctgttgtgaatagtgatgggagtgtacatgtctctttgatgttctggtttcctttcctgggaataaatacccagtagtgggattgctgcatcatatggtagttctgtttttaatttttcgagaaacctccatattgttgtccatagtggctgtactagtttacattgtcaccaacagtgtgcaagagttcccttttctccacattcttgtcaacatttgctgtcgttcatctttttgatagtagccattctatctggggtgaggtggtatctcattgtggttttgatttgcattttcctgatgattagtgatgttgagcattatttcgtatatatgaaataatacactgtgcatcttcttttgagaaatgtctattcaggtcttttgcccatcttttttttaactttattaaaatactgagttttatttcacatttattttacatatttttgtctccccaccatttccatgtctgaccaccactactattatgtcctatcatgacattccatacatacctaaaaccaagcaaagggtggagttccatctttaaaaatgaaacaggcattttggacaacgcagtcttggcaatggaacctggacaacatttatcaaacacggtagggaaagttctcactctgcattataaaaagaacagccagatatcaactgttgctgcttgcatttttgctttagtgttttctacagaacttttgatattttaggaatttttttcttgttttttgaaggattcttgtccttttgatcttggtgttggtggtattgagtcttttccattctgatttgacttttgtgcattttttggctggagtatcttgtatagctttctttactggggctttttcttcagtttcctcatcatcaaaatcatcatcattagcagcagcagcaagttttacttttttctctggaacgttgctaccacctccaggggcagatcaccttccagatatacttaagaatttcacatcttcttcctcttcatcttctgactctgcatcttcctctacagctactaagtgctgtccactaatatgcactggccctgagccacacttcaactgtaagaccaccggtggtattatttcaaagcccctaagggaaatcattggctgtacagacattttcaaagttgccagtgttactttaattggactgccttcgtaattcattgcctctgcttcaacaatgtgcaattcatcctttgcaccagcccctgagctgaccgttcttaaagataactggtgctcatcttcatcattatccaccttaaagtgatcatctttgatggcctttagttcacaaccaaaaagatagttctggggcctcacagggctcatgtccgtgtccatcacatctttcatggggtggtggcacgtacttaggtgggagagaaggcggatggagataaatgacccctgctccagagaacagctgtgcagggcggaatcacacccttttgctcattttaaattggatttttagttttttgctattgaattgtttgagcaccttatatattctagatattaactctttatcagataatagtttgcatttattttctcccattctgtaggttttctcttcactctgttgattgttttcattgctgaacagaagctttttaatttgatgcaatcccgtttgtctatttttgcgttttgttgcctatgtttttgaggtcatatccaaaaaatccttgcccagaccagtgtcatgaagtgtttcccttctcttttgttctggtagtttcataactttggtcctttcatttaagtcttttatccattttgatttgatttttatatgtggtgagagttagggaactggtttcatttttctgcgtgtgattatctagttttcccagcaccatttattaaatagattgtcctttccctaagatgtgttcttggtgcttttgttgaaaatcacttgactttaaatgtgtggatttacttctggattttctgttctgttccattggtctgtgtgtctgtttttatgtgaggaccatgctgttttgtttatagctttgtaacgttttttgaagtcaggtaatgccttcacacttggtcttttttttcacataatgtattgttggtttttttttccagttccatagatgctagtatgtgaacataatttaccaatccccaattgatagacatttaggttgtttacagttttgtattatcacaatgatgcagtggagtcagtttgcacataaatcattttgcacacatatagatatttttatagaataaataaaatacttatggggttgctggctcaaaacacatgtgcatttgaattgaattattttaaggaattgcattttattataaactttttaaaaataggaaatacatttacatagtacaaaattcaaaaagaacaaaggaataaatggtgaaaagttaatctcctaagctttgctgttgaaaatgactagatcattgtaatagattgtattattggtccaaatatctgctacccctcttatggagtattcccttttctcctagccactcagttccccgtacctgagacagtcactgtttccaacttattgtgaagctaaatttgggctatgatctaggaaaattggaatggctgaggaactaaaggttacagcaaggatacggagcaggtttttctctcttgttagatttatatagtacctttccttgggaaaaaacaatgtgcaaaagcactggatacttaataattttgaaattctacaaactatatgtagaacctagatgattttttttttttttactagagttctgtaaaaaaaaaaaacaaaaataagggctatgaacacaagctcttcttaagtacaatttttattagtactgttattggtggagttcttcctaattctgtcctttagccagaagcccagatttggtgatccttaaaaagagtggagaactcagatggacttcagctacgttttagtgatctccctccgtgactctccactgcctcttgacgttagcactacacctgctttttcagtagctttaaatttccacctctcagcaatcataagcatgccatagaagtctgaatcacacagggtattgaggtgactagctttatggacaggcttatttttatggaaattgtttttctttcacttaacactactgctaagagattggctatgtgtgtttgaagtwggataatatgttgtgttctgtttatgtgtcatgactttggtttgctgagcttgaagtccaggatacagatttttatttgtttccttggacaaattatgtggcctctttgtttcctcatctgtgtattgttgatgatgatgttaccttccttatagaatttgttttgaggattaaatgggtcaatgcatataaggcactcagtacagttcctggcacttaataaggtactcattgactcttagctattattcttatagttctgttttttttttttttgtatttgtgttgattggggtggttggtagtattttgtatatgtatttaatacaagataaactttatagtttttatagcaaaaaccctacattatcttcaaccctttgtttcttacagtcattttctaaactttatttttaactacttttagactaatagaaaaattgcaaaaaacaatacagaattcccttatactcttcactactagtgcagagatcgaaagcaggmcattaacattggtacaataatagtaattagactataggccttatttaaatctcatcagttttcttactaaggttcttttttagttctaggatcctacattgcatttagttgttgtttctccctaatcttttctaggttgtgcgaattcctcaatatgtcttcatctttcatgaacttgacactttaaaagactaatgggatttactttgtagaatgttcctcagtttgggtttatgtcatgttttctcatgattagaaggagcttatgtatttttggcaagaatactacagaaatgatattgtatccttagtgcatcatttcaagggttcataatgttgatatgtcttgtcactggtaatagcaactttggtcacttggttaaggttccagcttttgcctgtgaaactactgtctttccctttttagttgatatgtatcttgggggacatattttcacactgcaaatagtctacttttcttccaactctcacctactaagtttagtatccccctcagtggatcttgtctgtagcagtgatgattttcttttctcctctttccctctatctttattaaatgtaattttctgtaaggaagaactgtgctttcttcctcacttatttcttagattatttgcgtgtatcaatatggattcatagatacttatttttttctatgtgttaaagcccaatactgtcattatttattgtgttgctcagattgtttcatctttgaacattagaagctccttcattttggctcctgttttctttctaaagctttcatttttttgaccgcttccttactttctagtactacaagatgtttcaggcttgtcttatattttttcctacacaagccctggttccttttattggagaatgatgtttagaaatcatgatctggggccgggcgtggtggctcacacctgtaatcccagcactttgggcggccaaagtgggtggatcacctgaggtcaggagtttgagaccagcctggccaacatggcaaaacctggtctctactaaaaatacaaaaaattagccgggcatggtgttgcatacttgtaatcccatctactagggaggctgaggcaggagaattgcttaaacccagaagtcggaggttgcagtgagccgagatcacgccattgcactccagcctgggcaacagagcgagactctgtctcaaaaaaaaaaaaaaaaaaaagaaatcatgatccggatgctagagtgctcattgctacgagatgtcattgctgagtctcagtgagcagacttaggaaatatatgtatgaatattaagccatacattataaaaacatctagctatctgtatctgtctatccatctatattttaaacaccatgagtttatgcaaatgcttctgattccaatctaataccatagggctcttttgagcctttctttatttataacttctctgcaacaatgagaagcttagtccttatcatctacagtatatttgtggattcattaaaatagtttcagaattgctaacttgtaaccttgtttggatatttactaactagattacagcatttatgtacagttctttctgtctttagccttacaacatacagtcaagatatatttttccatcattccttaggtaagttcttttcttctccaccccctgcagtgtggttatgttattcatttgtagtatagaaagggtcatctgttagtgtttatatttcctttaggtttccctccacatcctggttggttttatttgtcttctgggtgtttaaaaagtatgtgaaacatgcatggctgtgattctcagagtcagagctacacaaaaagatctattgagagcattgacacgccctctttatccctgttcccctccctccatttccccttctttctacacctttcccacccattccctgtagacaaccatttcttagtatctatattatccttcctttatttcttttgaacacatgagcaggtacacgcagtaacttttaaaatcttttttctattgtagaagtaatacatgttcattgtaaaactattagatgttagaaaaacatgtaactgataaccactgttatccgtattggattttaagtgcatataatcaaataaatacatagatattaaataagtaggtaactcagataaatacacttaatcaaattttttttttttttttttgagacagaatctctctctgtcacccaggctggagtgcagtggcaggatcttggctcactgcaacctccacctcccaggttcaagcgattctcctgcctcagcctcctgagtagtcacgattacaggcatgtgccaccacacccacctacgtttttatatttttggtagagacggggtttcaccatgttggccaggctggtcttgacgtcaagtgatctgcctacctcagcctcccaaagtgctgggattaccggcatgagccgccgtgcctgttcaatcaaattttatatatgtgtactaatctaatggtgtatagtcatatatataaaatccagttgttttatttaatatggctgaaatgtgttgtgtggttgatatttatgttgagccatctctatatgtgcttaaaaattctttgttctacagagttagcactgttttgagtgacctgtggataattttttgttccctgaggcatctgtagtacatggtgattttccaggactggggtgtcagaatgctggaattgcgccttagttcttctgttgatcagctttgatgtgaacttaagtaaatcacctaacattaccaagcctcagatcctccatctgtaaaataattcccaaagttctgctgggacaagaactgtactttttcctttcttagtgattttaacacaatacgggagcatcttgggggagattgctctgcaaaagtrgtatcatatgtatacttagatgtgattttgtttgtagtaccttgcagaagccggctggacagctgaaggaagagtggtaggagtgacccagcctcgaagagtggctgctgttacagtgagtttctttttgtgttggaaagattctatctgtgttgtctacatttgtgatttgtttacatttcctaaaggctttaaatgaatagaagttgctccttaagagtttaggtcttcagtttttatgttttttttatttttatttttttcctcagacagagtctcactctgttgcccaggctggggtgcaatggagctatctcaactcactgcaacctccgcctcctgggttcaagcaattctcctgcctcagcctcccgagtagctgggattacaggcatgtgccactacgcctggctaatttttttatatttttagtagagacggggtttcaccatgttggccaggctgttctcaaactcctgatcttgtgatctgcctgcctcagcctcccaaaatgctgggattacaggcatgagccactgtgcctggccaggtcttctgttttaaaagaattatgatttgaatatttttgttaaattgatcctgcacattatgaacgttttaaacaataaagtgctgaggaaataaaaaaacaatatatttttaaaaccccaaatttcaccatccaacataaacaatgtgaacatttgtgaacatcattccaagcttctcctaaagatgaagatgaatggttgactggctggatagaaataattttataaaaatgagatcatatttaatatttattttttattgaatttaacaaaataggaaactttagtgaaataggagtagcgactgtactttggataaatgttcaccgcaagataatttattaaagcttgaaaagtaagaaaaaagagtacaaaaaaattcargatgttacctatatttcaaattacgccttatagtttcctgttatgaaagaagaggaaattagcacatgtattcttctttccaccttccctttctccatttgttgtagatacagtcctgtcattttcatttcaagatttataatatacatgttcttaatcataattctcacaggtgtttaaccttaattctagcttgaatggattcattactcatcattagttattttctatggttttgctaaccttgaattgcttgttttgcttttatttcttgtattggctgaattttatcattcagcttttttttttttttaatatgcttgagaatgttcagttgtggtttttgttgatataaaattcttgattcacactgtccctgcaaactgcagactttgctcactgccttttggcgttgaggatcactgtgtagaagtctgagccaccataagttttttgttgatagtatgtttgaattcttttgttgtttttaaattagctctgagagattgggtgtggtggctaatgcctgtattcccagcacattgggaggccgaggcaagaggattgcttgagcctaggagtttgagaacagcctgggcaacatagcaagaccctgtctctacaaaacaatttttaaaaaaattagctgggcatgctggcacctgcctgtggtcccagctacttcggaggctgagccagaaggatctcttgagcccaggagttaaggttgcggtgagttatgatcgtgtcattgtactccaacctttaccctatctccaaaaaaaaaaaaaaaaaaaaaggcttaaagaaaaggaagtagggcctttagtttgtggcctttacctggacaaacaattaattctatttccccaagttatttttgttctgtactgagttttaattattgtgtcgttgttttgcccaaagttcattttctaatggtgttcaattaagaagttatacagttttagaagttatgtgtgtgtgtgtgttgtgtttttgtatgaaaatggggctaacagtttggaaaccaagttgcaaatgctgctggagttaatcttttttgtcactaaaagatgactcagttacctaaaattagaacaatttttcctgtttgtggtttggaatcccagctcttaatcagtttgcatcttagttccaaatttgtagccatggataacttccatgaaaccacagctttctcttgaaagagcaaagagcatgtaatatattaatagagctgtcaagtttgaaatgctacatctcagaaagtactttatgtgcagactaaaatctgcaaacaatctcagagcctaaaaacagattgcataagctgttgcttgatctctgtgagaggcaattagtagtgagtatgcttgttgaactcatgtggtctgggtttgacttcaagaccaggtaggtcctccctgacctgtgattcagaataagctctaacacctgtcttatttcagtttcctcatttgtaaatacaacagtgtctcgtctacctcatgggctgtgtgtctatttaatgagatacaaatttgtgaaagcttagagcacagcacttgccagtagtaggtgctcagtgattttttttttttttttggtcttttacctccctttccttttggtctgtcaaaaagatagtatttgtccagtctagttgatgaggttattgggagcagaactaaagtgatagagataaaaatctattaaaaagccaagagaatataaccttgtgtgattataaataataaaaatttaaaaatagagtttgaaaataaaaatacatactttttatagcaaatgtattcaaatagtgaaggagtaagaataaacaggtttggcttttaccttatagacccataaaatgattatatttttacagagatttgttaatttatgctcatttttttaaatttaaaatttttgtgggtacatcgtaggtgtatatatatttatgtatgctcattcttataagcctattttctccataagttcctagtatctctatgcacacattctctacctgtaccatattctgagatttataatataacgacatgtagggttgaaattggaacagtaacaataacaaatctgtcctggtgaaatgctggtcattgggaaatacaaccaccagaggcagagcaatgtaggataactttctggtttcataagacgttytgaaagcctacatgatatagaccagctgccagatgattgatttggttttggcctccccattctataatttcaagtcaccaggcagagctgcttctgatcctcatctgctcttcagtgtcttaaacactgatgggcaggaaacgcctgggtgtgcctagctcagaagctgagggcagggagcctctgccctcctgagcctggggctgctggggtggaaaggctggagcagtaagctctgtctcaggacaccacatgtgccagccatgttctaaagtcaggacttgggaactgcgtgggtgctggggaggttgtctcacctgtgaaagagggagactgaactccttccttctgtggggattggtgtgctgggccctgggaaatctctattaatattgcttccctttggttcttttcatttaggtagtttatgtggtggtgaatactaaactttcttttctttctttttttgttttttgacacagtctctttgtcaccgaggctggagtgtagtggtgtgacctcggctcattgcaacctccacctccccgggttcaagtgattctcctgcctcagcctcctgcgagtagctgggattacaggcgcatgccaccatgcccaactaactttttgtatttttagtagagatggggtttcaccatgtcggccaggctggtcttgaaytcctgacctcaggtgatttgcctcccaaagtgctgggattgtaggtgtgaaccaccgcgtccggtcctattttcttttaaattaaactaaatgatattcattattgctcttccacttttatgcttgttcattcttttaaatattttctattaataagttaacttttgaatagccttcttgggggaatgcagagatcttgctgttggattcatttttctctttcctgcattcattttttatttgttatgttttgatggatgaaattttgtctatagtttatggtcttcataatgtattacatattttgtctttcactttattatgctaccttggattttttattgatcttctcatccactcatctgccccctttgttttaaacctgagtttgtctgtatttcccctctcagtggctttggcagctgggacacagttgtgaactgtttcaggtatctcattcttgaaacttagctttttgccttcgatgagaaaatgaaactggcccagctttgaatatggtaattcctgttctgccttcatggtcccgggggatgggttttcttttcgagcgtggagatgaaaagttgtccctggttagtgtgccctttgtttaggaacagggkgaatcttgtcatttcttttactttcctttttgctttggccaccaaatttagagctgaatttrtggctcaacttgaataattttggcatatctatgtttaacattttctcattggctttgatcttttgaaattttttctgtaattttttggatcttgatccgtaacatttttatgtgattttgtttttcattgtgtaygttcttataagttgccccaagaccattatagaatgaagtgagatrcataagttaataattggctgggtgtggtggctcacgcctgtaatccctgtactttgagaggctgaggcgggcaaattgcttgaggtcaggagtttaagaccagcctggccaacatggcgaaaccccatctccactaaaaatacaaaaattagctgggcctggtggcgcttgcctgtaatcccagctacttaggaggttgaggcaggaggattgcttgaacttgggaggtggaggttgcagtgagccgagattgtgccactgccctccagcctgggtgacagagtgagactctgtctcaataataataataataaaaattgcaaaagttattatgcttgttctctaataacttgtctcttttcatttttcattgtgttcacatactatttaaaatataaatgacctttagattttccatagtatgtgcgctgtgcagtaatttctatgtctctattttcagcatgatctttcttcccaaaggttgcagggagagtagctgaagaaaggggtgcagtgctgggccacgaggtgggctactgcatccgctttgatgactgcacygaccagctggccacgagaattaaggtaaagtgctcaagctgcttttcctagtggaaataaggaagaaggttattttgggagaattaaaaacatgtagtccttgctgctgtacaggacattgataccatggcagaaagtgaagaaaagtatcctgacattcagagactttagtcagctaggagacagagagctcttccttttttcttttttttttttttttttgagacagagtctctctctgtcacccaggctggagtgcggtggcacgatctctgcttgctgcaagctccgcctcctgggttcacgccattctccttcctcagcctcccgagtagctgggactacaggcgaccgtcaccacacccggctaagttttttttttttttttttttttgkatttttagtagagacggggtttcactgtgttagccaggatggtctcaatctcctgactcgtgatccacctgcctcagcctcccaaagtgctgggattacaggcgtgagccactgtgcccggccgacacagggctctttcaaagagtcctgcaatcttatcccagaaaggagcttggaagtcaggtttagtccttgattccaaagatgaagaggttaagggcttggaaggttgaatgacttgcctgatattatatgccaatcagtgataggaccaagactcaaagctgtcttttcttatgtgtattttattgtattttcactgactcaaatagcaatcgaaatatagaaacaagcctgtaaaaggcttaaaaatagagtagtataagttgatgaagtgtagaattcatgaatgttgtttcactaattagtacttttccattttcatatgaaaatggattttacatgtgtgttctttggccttgttgctaatgttaaaataattagtatcaatagtaatcagtgtataatcaactcaacagggtgtgtactacctaccaccgtgctagaatcaaagtctaatcagacagtgcaataaaacagtgaatgaaaataatctgatgaaatgaaaattgattattagaatctcagttacctcttaatttgcaacagaggaaaattgaaaatcagatgagctgaatgaccaatgtagtgatttgtaaaaatgtagaccttattttccagattgccatattttgttatattcattttgctaggtgaagggaatatttttctgtaccatcaaatatatttgaactagctaattttcagtggtttgcataaccatgaaaacctttgagccgtccataaaaaccttttgtattccatttggtcacaatttcaaggtgctcagttctcgactggtgatttgtcattggtggaagttctcactacgtatgtatgtggcagctagtaccaggtccaagaaaaatatgatggcaatgcatcctgctcttaaaacaaaaaaagtaaaaaacacctaagatacagcatgcaagggagatggtttaacctgaaaacaaattcagtacgttaagaaggctgttactgtatgtgtctgaagcattttataaagattcattaatctgaaataatattagctgacttttcttaaacactactctgtcctaggtcctatgctaaacgctttacatgtacagtcagtcctctgcatcctgcgggttctgcatctgtggattcaaccaaccttgaattgctaatattacaaaataaaaataaaaaataatgtaaatttaaaaaaatacagtataacaactatttacataacatttacattgttttagtcattctaaataatctagagatgatttaaaatatatgggagggtatgcataggttacatgcaaatactatgccatcttatataatggacttgagcatctgcagattttggtgtgggttgggggggtttctagaaccaaccccacaaggataccgaggaactactatactatcttatttatttttcacattaacttggtgaggtaaatactttgattacctcattttacaaatgagcaatcagggacagagaagatgagtaacttgtccaaggttcacacagcttagtaagaggtagagccaggatctgaactcccagcagtctgacaccatagcccatgtgcttaaccatgatcctatctagagtctgtaaaataatattaattgaagtttaagttaataacctcaagaactgcaatctatagtctttgggacatttgaagagcaattatcttacacttagggtgtttctttgggcagataccagttagtcttcactgcctctttatcgatagtactggtggtgcaagcccagaggaaatggggcatagctgatgttcccataataaaggcaagtgaaattctgctcaaagatttgcaactccagctgaggaccctgtgtttaaagccttttgtgaasaattacattgcttgataacgaaaatatgggggcattttctcacagtcctttgtgggaatttacttgtacacatgctggcaaagaggttgcacttgaacttaaaaaataccattaatatgtagtgtaagtgaattatttctaaagctttgtgtttttattttttagtttcttactgatggaatgctggtcagggaaatgatggttgatccgttgttaacaaaatataggtaaatgtgtttttcttatgatagctttcctagtttccaaagyccccaggtagacggagaagcaggtgtgttagtagctgggattcacgtctgtgttcagctgccccaaagcttttctcttgaccttggctgttgggacccttggtgtttttctcagaatttaaatagtatggccctttacagacactcaaaaatgggcacattaaaattcctatcattacttagtctggtgacttgtcctttttattttgccttgtcacactccagtattgatggtgactgcagagaactaactgccctgtgttaaatgtaatatacagagtccaaataattttttatcacttccccctctttgtctatctgtctgtcactcacagcattaaagctgtcctacctaggctctggtgttctcgaggagagtgtcacatttgaccccctggcccacgtgtgtcacaactgtagtcagctacctctttgactgttgttatagcttaacagtcttcagatggttgggctttgttctgatttttatgtgttctgtggggttataggttggttatgttttcatttaaaatcagataytaaattcygttggaattcagtgtggatggtaaaacgcttaaagataacaatagtacactttttaaaattcaggtatgttaatgtcaccgtttttattaacctaagaattgcctcattgtcaaagaagagtgacttaggtttacttttsatgcaaagtgattgtatgaggactaaatacccagaagctctttgatggtctagrtgagatgatgtgtggcttttttagaggctcactgagagcttctctttgattcttagtgtcatcatgctggatgaagcccacgagaggaccttgtacactgacattgccaytggcttgctaaaaaaggtatgacttcactgccagcttttcattgtgtgtgtttattttattgcctaattacaaaagcaactgtagcaacttggaaagtacaacaaaataccaaggaagaaaattaaartcatccataatcctacccattcagagaatatcagtggtagaatgttggtatattttcttctcttttctgtgtgtgtgtgtgtgtgtgtgagtgagtgtgtgtgtacttggatctgttttggcatactagggattgattgaattatatatactaatttgtatcttgcatatttcccttaacattacattaggatcatttttctgtgtcatttaaatattctctgaagatattatttttaatggctatttaatcacatctctatcataaagtatttaacttcccctactgttagcaatttatatggcttgcagattttaaatattataaatactgttgtagcaagcacccttgtaattgaatctgctgcatttctgtttattttctttaactttttattattaaggtttcatacatatcccaaagaagtgtataatgacccccatgtacccttcatctggcttcaacaattacaactcacagccaatcttgtttcaatcttaacctccactctctcctcccttcccatattttctgattgttttctttggacagattcccaattagagtctagaaagaagtggtagaacagggtgattaagagcataggcattgagtcagactacctgggttcaaattctggctttgctgagtttactcatctctaaaatggggaaaatagtagtctctatatctgtgctggtatactttcctttatggtagccactagccacctgtagctattgagataaaagttaattaaaatagaagaaagtaaaaaaattcaggttctcagtcacgttggctatttttcttttcttctctcttttttttctttttttgagacggagttttgcccttgttgcccaggcgggaatacaatggcgtgatcttggctcaccgcaacctctgcctcccaggttcaagcgattcttctgcctcagccttcccgagtagctgggattacaggcatttgccaccatgcctggctaattttgtatttttagtagagatggggtttggttcctccatgttagtcaggctggtcttgaactcccaacctcaggtgatctgcctgcctcggcctcccaaagtgttgggattacaggcgtgagccactgtgcccggccacattggctatttttcttttctttttttttttttttcacgttggctatttttcaagggctctatagccacaggtggctagtggcttatgcatcggacagtacaaataaggaaagttttcatcattgcagagagttcttttagacataggtactgtatattgtgatttgttatgaagcttaagtaagatagcaaaaaacttttaggttggtgcctggcatagggtcacagctagactgtgaggttcttttgtgcaaattagaaaaagatgttccctctgggaggatgtctagagctaggtgggaggcaggtggaccggattgctgaagcccctagccccctcagccaggcatctttgcacagtgggtacactgtgtacctgtatgcagggcctctgggctagcacataagttagtctgtattagttgttattattattattttcattgttattttattccattgccaaagatttagattttttgatactttaagggaattattgtaccatgttattacctttttcaggaacggtataataagagggccgatttcactgaatctttgccaacactgagtattagccttaaaaaaataaatccttgccaatgggatagatggggaaaaaaaaatctcattgttattatatatcttagctgtagctcatttggtcacttctccaatgcctgttgattatgtgtttctttgagtaactgttaatatcttttatctcttttttttttgccatatttctgtcttggtgttatcatttattgtttgtttgcttttaatatactttttcatacatagattcaaactatcttgagacccaggtgtcaggaaaaaatggttttattctcagtaaattcaaatttgggtcttaaagcttctttatagtttttataatttaaaaaaatttactttggaaaattgcatacatttacaaaattggaagtaatagtgtaatgacccccccccccctttattgacaattattaatttgtagtcagtcctttcatctgtaagctcccttacctcctcctcaggcaaaaaagaaaaaaaaagacactgaatttttgaaatacatttcagatatcaaatgatctcatccataagtgttgcactattatcattatttccaaatgtcttcttttttagattcagaaaaagcgaggggatcttcgattgattgtagcttcagccactctggatgcagacgtaagagccttgcctcccctttcctcctctcctcacaaacacttttgtcctatatatccttgggaagttacctctagcaagagcttatctttggcagaatgccctatcttctttatgggaccatctgatgtcctagatttcatataatcagaggttactccttttcagcttgtgaaattagactgtaattaattgagctcataattacctacctgtcttgtttatctacatactgtctttctccccacttacacagcttctttttgttgttttttcagtataagcctgtatttcttgaatttgtttatttatgactatactgtatagatttagatttttctgtgcaattgaagtttctcctgggctgggcacggtggctcacacctgtaatcccagcactttgggaggctgaggtgggtggatcacttgaggtcaggagtttgaggccagcctggccaacatggtgaaaccccgtctctactaaaaatgcaaaattagctgggcgtagtagtacatgcctataatcccagctacttgggaggctgaggcaggagaattgcttgaaactgggaggcagaggttgcagtgagctgagatcgctccattgcactccagcttgggcaacaagagcaaaacttcatctcaaaaaaaaaaaaaagtttctcctgtatatataataatttccatgttaaagttttctgtggctaggtttacattatttttctctcttgtggacctatagtttaaacagcagctcaactcaacaaatacttttgaccacttactatatttacatgcagaaatagatgtttgcagttcagtgtgttcaaagttctgaggcagctaaggagggagcccttaactccagccagctggggggtgtccagaaactttcgcagaggtggtgacctaccagctgtgcttgaaagatggacagccgttttccagatggatgaaggtggggaagggcaccctaaatataagtgaaatcacagggacatgaccatgagttcatggagcttcgagtcttatcttacctgccaggccctcatgggtgaattacccttgaactccctctctgactttatcttcttccactttctccagtgctccctacatttcagcctcactggtctccttgctgttcctcaaaacaacccaggcatgcttctgctctggaggaaccctctttttagaccattccttccccggacagcctaaggttctctcctaatttcattccagttttgagcatttattatctcctcagagaggcgctctctaaaacagcaccccagttgctctttattcccttattctgattttttttatgtttctcacttgtctatcactatttaacattatatgcattgtttattgtgtgtctcctgtcactaaaatataagctccatgaagatcaggactttgtcttattttatctcttccacctaaaacaatgtctagcacagagtaggcacttgggttgaatgaattttgactgactgggaagtaatggaagattaaaatggggaggttggggtcagatgacggaaagccttagaggctcagccagagaggatgaactccatcctgtatctggttgggagccatgggaacatgtgagagagggcagtgacttcatcatgtttgagctctataaagatcattctgagtgctgtgtataggagatgagagtagatatggagtctctagtaaggaggccagttctgaaatccaggtgagatgtggtccctggctcctggctcctagtctccctgtggcttctgggatacagaacaacttggagagagagaaagcttaccatagcgaaggtaaatgtccaaygtgtcccgagactggtttctcagacctttccacaggctgtaggagtctgttgttttaggtctgcccatggtaacttttgggttaaagctcctctgttgccctgtttaattgtcatctccctcacccatggtatctgctggcatgctattttgtggactgtggctgacttcacctctagttagctcctctgtggctacattacacagaacatctgtatctctttttcaccccccaccttaaaaattattaaattaagttaaaaattattccagtttttattatgttgaaaactataatgtccaagtcttttcttagattcattttatttatttatttatttatttatttatttatttattttttgacaccaagtctcactgtcttgcccaggctggagtacagtggtgtgatctcagctcactgcaacctctgcttcccaggttcaagtgattctcgtgcttcagcctcccaagtagctgggactgcaggcatgagccaccatgcctggttaatttttgtatttttagtagagatggggtctcatcatgttggccaggctggtctcaaactccggacctcaggtgatcctcccgccttggactcccaaagtgctggatttacaggcatgaaccaccacgcctggccagattcattgttaattaatacttactaattgttcacaattgccttttattgtcttggtggaacacagagatgaaaaaaatagcttctttcagttctgtctatggtagttgatatagatgactttctggaagcaattttgtaagcgggaagacagcatgtaggaactttgtcatgccttgctctgctgtggtacgggacatgctggacctctggtaagctgggccattccttcttatcctgtccttgctgctcagccagtgcctcctgtgtgaggggaacggtggtttctaagtgtctgtgaatgggggatctgtgtgtgtgagtcatctctgtgtgggttgtgggtccgtgtgtgaggggcctacgtgaggtatgggatgtgagttcgtakgtgagtgaaagaaagaaagaggatataagtgggcgaaagagggcaagaatgaggactatgtgggagtggcaggggggttgggtgtggcttaggaaacattttgatctagaggcgtagggaagtccagaactcatcccctgccccccagcggctgggtctgtgggtgacagactaatttcaaacctcctagagctagggctgctgataggccacctgccgtggtttctctcagggactggggtggcccagcctgcagacaaagacagcagtggctgcagccgggaggcagagacctgcagagcatgatggggctgatcgaatagctgctttggttgctttatctgctttcttaatgtaagcccaattaaacgaacaattatataacatgactggatataattatgaagtatttattgatcctgtatcacgtgatgatattgcttttcttttatttgcgtccaactgcatggcagaatatatggttgctggtagctcccatagtttttttgtcataagtccagctacttgaagagagactaatttctctttccagattcttagagaaggaacttagcatcagctggggtcaggtctccaccctggaccagtctacatgggccaaggctgttggccaatcatgggtgtgttgggtagacatagctgcttatcggccactccagtgggttaggaaggagcaggtaccagggaaggagcctatggtgagctagaagacaaccctgcagatggccatatcatttacattccatttcatagactgtcccctgcctttttatgatgtatgcttcttaccatgtctgtatgtcaatgtgaccccacctctttcaaacctgactcaaaytcttcttttctgggtgtgttgaacttattttactcttcttgttccttgattctgcctcaagattcttgcattgttggtactatatttatttacttttttatgtattttgtatttccaaataaagatacaagataaagatcttaaaggtcttgtgccttctcagtaaatgctgagtcttaattctttttgttttgagacagagtttcactcttgttgcccaggctggtgtgcaatggagtgatctcggcccactgcagcctccgcctcgcaggttcaaacgattctcctgcctcagccttcctagtagctgggattacaggcgcctgccaccacgctcagccaatttttttgtatttttagtagagatggggtttcactatgttggccaggctggttttgaactcctgacctcaggccatccacccgccttggcctcccaaagtgccaccgcatgagccaccgcatccggccgagtcttaattcttgaaagagtaactctttacttttcagtaccacatagtccttaacggtaaggtttaggcatctactctaacaaaattgtcaaggcatcatcttcttccttgttctgcttgcttttttggtaacattcacccttgtccaagccctttggtaaaatcttcctccttctccttccatagctcctggagccctgctgacttccctctcctacctccttgttggcttcctcttgggccccttctctgtctgctcttccttctcaaggctgcacacccctgtggtccctggttcagctgagccttcgtgcttgtggcagtcttgactgtgtgcttgcacaccagccttagctgtctgacagctggctagccacagacatcctaaactcataaacttgtgactctctgattctccatctcagtctctttctcatgatcatagtcatttaggccaagacctccattgctttaagaagtttttatccccggtcgagtaagagtcactctagccttctttccaatgtgcacgtgtgtgcacgttcactcactgattgccagttcccaccagctgtatctctggaatgctttgcccaggttcacactttgtctcccctgcactattatgatagcttcattaattagtttgtttgcctcgaatctcttatttcctctgccctcctccaaaatggccactggagtctgggattcagctcacaggtctgataatatcatgcccatcctcactgcccttgtcttgcccatcgaataaagtgccagtgcagctgatcacttgggtcccttcagagttatggctgacatcacttattgagtgccattctaggctagatgtgtgtcacaactatcccacatagtttatttgaacctcacagcaaccttgcagggtggatagcagtttgtccattttgcagatgagagagctgactcagagatgaggaggcctagaccttgcctctgtcctcccttagggacccctttacattttagtccayactgtgctattgtcctgggaagggatgtctcccccttcccagccagtaataatcctccttagcctttacagtgcaggcaagggatactgctttctccatgaagctctccctgaaagccggtagttcttaacttttccttctatcagattgcaatctgcagctctttcctggtcacagggtcatctgcctcagggattattttatgatcaactctttgcacgtctgccttctgtgaactgtttactcttttggggcatggggtgtctgttcccacttgtttgtatgtcacttctagtgtacctgtgctgtgcatgtcatagggatgcaggaaggctgaagcaacttgaagggaatttacccaaaagaaagtgaacaggagtactgtgtggaattctgcatagcaaaacatagttttgttgacatgaggcactttgatgtctgtgcttattcttctcaattttgaggttaatatataacatccctgtattttgtggttaaatccagtttactcttttaaaagtacccctcagagccccttcacttagcgtttgatgccattcgttagcacagctcctgggctcctgggtttcctggagcaggatgggcatgttttgtaaaggtacatagggaaataaagacaagctttgtagttatgtagccaggcctcagggaaatgagtagaggtggggaatggaaagggcacccagattcaaataatggagcactccacccgacgggatatccatgccccctctgcagtgggcaccagctgcttcccatctggtgctcacttgcctgcctgcatggtcacttagctcttctcagtctcagcttctctttgtaccttagggtcacattccccaagagaggatctttggtggcgtttccttcccccatcattggctggagccctcaagacaggtctccttgtgggctgcaagtggtggtcaagtaccattaaataggatgtggacacctgtttggcagaaactgccaagagacacttctcccaacagggtactgcacgagtgttggggaagtacatgattgatggcctaccccatacaaagcctcgcactcactactgtagggcgtgtaaagatggagaagacactatccctgccatcaagtggcctaaaaccagtaacaatggggccggaaacacacctactgttcacagaaggaaaagtttcctatcaaatgatcatatctgtgttttccagatagagttacccaccaacctcatctaacctgtactgaacttgagtcacacctttgacctaatttttgcttaaatgaaatacagaggataggaataatataaataatactaaagctacatgttaactcagatgctatgctgaatgcagttttgaaatctaacctttattatttttattaaaactttagtaaagacactgtcattgaaatgtgattccccacaattacagttagaaaaatgtgaatttaaaaaatgtattttgcaacccataatctgtattgcacatatataatcttgctactcacctgtctttggcaagttttatattattttttctttccatgaatcgctacgaacctttttttctaagagaaatgaagaattaatttttttctttttagaaattccgggatttctttaatcaaaatgaaaccagtgatccagcaagggatacatgtgtgatccttacagtggaagggagaacatttccggtggatatcttttatctacaaaggtttgatgatgcttgaattctggatgatggtgtttagaaaactcagcctctgatgtagaatgtcagaactgcatttgctcacaactctaaaggatggggaggagcatgttttgtgtccctwgtcattggtctagaatgttcttaccctgctccggatcactgctgaatttagtttaaactgttcacactgacatgcwagtttccgwaagtctgtggccagtagctcagccagagagagcaaaagtggtgaaaggttttggggagggaagcttgatagttttcagaactggggtttacaaggctgcctgtcagcaggggcagtattggtgatttgaatcatttggctctcagttctctacatccctagcgagaaggcccagttggcatttttaggagtagcctacttggacaaggaaggggccatcctaattcctgtactagtcactggacaaaaaaagaccaggagcctgttccagtggctgataaatccagagtcgtggacttgatttctgaatcgttttgttggagagctcatccatcagggccatccagccgacccatagatgctgctattggttaggagggaaaatgggctgggaagagcgtgggcttcagcactgggaccacagcttccgattttcactggtctgatgtctttgcatactaaagatagcacatctatttgtatgggtatatcatgttatttctttccaaataaagctaaaaatcatagttgacatataattatggattattcttgaatattagatttgaaaaaaatgaatatttattttgtttatcctgtactaattacctactgggcaggcccaaactcactttgatgagctttgctgccagattattagggtaattgatctgtaattaatgagcatattctagtgatgaattcatcccatttgtcttttcagtcctgttccagattatatcaaatcaactgtcgaaactgtggtgaaaattcaccagacagagggagacggagacgttttagcatttcttactggccaggtaatgccactgtacttctctgatgaatagacatgttaagacagcaccaaaagtaatacagagccttgttactttactcagtcatgtatttcatgttttgttgtattttgtggttccataattgtgtagaaaattgatttgatrtcattcatctaccatctagattgtcagggactcgttagcccctgcctgttctgtctgcagagggttaaatgtttttttaaatgtattagctgattccaaaataaactaggtagttgagtgagggctattttgtttgccagaattggatactacattaggtccatgtcctgcacacatgttgctgctgtgtacctctttttccagtgacacctttacagctcatcctggaggtgataagtggccatattactggtaaaacaactgaacagacccaagtgctcgctgacggtggccagcactattcagacctgccctccaactgtaatcttttccactgccaaacactttccatggttcagtaatcttttttggagaaagcttacagtgattttatatgctgcaacttgtctatatgcatgagatgcttgtttgacaccgtatatgtatgctgagtaaaatagtcatcgtttttatttattgggaactcttccattcattgcagatcataccgagtttttagtaactaatagtgtagttgcaaaatttcacccattgtcatcattgtgtattagcatttaattaaataccatcccagrgtggaacatgacggcactgaaattcttgaatctgaccaaaattaaagtccagatcccaacttttattttctttcagtatgataaaatagcatgctttaaattgatctcggtttctttggttcctggttcaacgtctttaggaagaggtagaaactgttgtgtcgatgctcatcgagcaggctcgagcactagctcgcactgggatgaagagacacctccgagttctccccatgtatgcaggactgccttcctttgagcaaatgaaagtgtttgaaagggtgtcacgcagtgtcagaaaggtgagactatcctgatgaccaagggtgttggcagccgtctataatcataatgatgctcytttacttgttttgaaacttgctaaacacaaggcagacttctaggtccatatttctgtgtagtagatctaaaagcacacaataaataatacattgtgaagatttcttttttttttgagatggagtctcgctctgttgcccaggctggagtgcagtggcgcgatctcagctcactgcaagctctgcctcccgggttcacgccattctcctgcctcagcctcctgagtagctgggactacaggcgcccgccaccacacccggctaatttttttttgtatttttagtagagacggggtttcactaagttagccaggatggtctcgatctcctgaccttgtgatccgcccaccttggcctcccaaagtgctgggattacaggcgtcagccaccgtgcccggcctgttgtgaagattctaaacctgtcccactgaaggatcactttgacagtagttatcagatcaggtgacttctcttttcttctcttctgccttcctaatatttcccacgacacatgcttactttggcttaagggattgtttagggggattgaggtcagtcaggagcaatagaaaaattggtacacatggtttctaaataatttgttttaagtatcagcttgcctattttaaagggccaagtttaaatcaattaattcaaggtgtggcttaaaaatgtttagccttgaagtgagagtgaggaagggtgtggtggaaagcattggtttgaaggagctggcaggcagccagtccacctgggcctgactctgccttttcctttcattagatgaggactgcacagaaccagcccgaggacagcttttactgtagtagctatttatcaacagatggcagagaatagagcaggtgagggatggtctgaggatccactcccaatttcagaccacctggaagagggtgctcagccccttgaccattgggatggagcaacatgagtctgccctgtcaaacattaattgcagccagccaatcaggagacctggattctgcccctgagctactatgtgccttgggacaactgacttaacctcgaatctgagtttttgcagctgtaaaacgtaaataataataactttcagataggtggttttatagcataacatcttaatcccaactacataaaaatattagaaagattattttataaaatgatcatttataaaataatttttataaaatgatttataaaatgtaaagtgcctgaaaaaagttctaactgctatatatatgtgtcccctgctacttaaacccttcaggggcagctcccaatgtactgggaataaaattcaaatacctcatggtggcccagagaccacatatgattgcatatctgcctccctctgcaacctcatcttgtactttgtattttggctgcactggctgtttctccttcctttgaactgtttcttattcttggatctctatagggttggctgctgcttgttactcaggtctctgctcaaaatctttcacagaggctctgcctggccaacaaaagtaaagtagcatgccctattattacaataatatataatatacatgttatatactacatcatatcatattgcctcattgtgttaatattttctttatagtatttgttgttctctgaaattatcttcttgtttatgttcagcatgtcttcaccctaaacactcaaactagaatgtaaactctggcagagcaggggccttgtctgtcttgtttatcctacatcccagcaccttgaacagtgcttggcaaagtgcacaccctcagaaagtaatcatgatatgaatgaataaatgactatacctgcgcaagatggagggtgatttactttggttatgccaaagggaaaaactaacaaatgctaggctctgatcactttatatattaattgtatatagtcccttcagtagccctaggggaggtggtaaatcttattatgtagatgaggaaacaggttcaggaggttgagtaacttgtccagggtcacatgattagggagaattcaaacccagggcaccccctgacttggaaactcacagtctttctagwatattaaactgcctctcacagattctgcaatgttggaaangttaaatcttttaggatttttacgagtttgttaaaagcaaaaagaataaaatgagttttattcttctttctgtggggaacgtaggtgatagtggccaccaatgtggcagaaacctctatcacaatcagcggcattgtgtatgtgatcgactgtggctttgtgaaactccgagcctacaatcccaggacagctattgaatgcttggtggtggtgccagtctcccaggcatcagctaatcagcgagcaggacgtggtggtcgtagtcgctcgggaaaatgttatcgcctttatacaggttagtgtggctttccctaagggttttnsactttcttatagtcagcctgggcaacagagtgtagcaaatgtttactcctaatggtagaacttaacataaaatacaggccttcctcacaaggccctgtgtaatcagatccccactgctttcctcactctaaatatggtgtttctttgttactagtccccattggccaaagctggcctgtgagtgactgcttatttgctatcctgttctaacctaacatctgggcacaggcctgtgtagccatttgtccctagggtgtgggctgtgtgtcctggagcctgtctttcttgcctttctttcttgacttaatgtgctgtttttgtattccaagatccctgagtcttgcggagcctcacattgggttccccttttacttctggttcagagcatctttgccaagtgaaaatggaaggtctgtccggagactcattcatagaaaacaaatagttggtgagctcctcctctgtgctgtgcatcatgctaggctctgagggaacagaaggcaattttaatactgtctcagcctttctggagctttctatccagcttgaagacagccttacctatagacagtgatggacccagagctgctctttctctgcacttctcttctgtggggaatgctgctgacattttccccagttgtccagactcaatttccaagtcattgttaattctcttctttatccagtatccatctgcattcacttaaccaggcccagggttttttattttgttttgtttcttctggtgtggctgcccctaaagaaggtccaggggttttagctctgccatttgtctcttcttttcctttctggttattattgtccttgttcagtctttgatgttgatctttcttttagcagatgtttgcagagcacctgctgtatgctggccacggtgctagagcttggagatctggggctagtaaccatggtctgtggccacagtgactgacagtctggtggtggaggtagacctcaaaacagatcagcatattatggtatgatagggagccataaagaatcgggagccttggaagcagagagcagaggcttttccttgggctgttttccctgcccagcagatcttccttatctttcaaatcctctctcagatggcagttccctcatgaagctaccttagatgccttctcctagaagctggtgttatccttctggggatttggggagtacttcacaaccagggtgttgtttgagcctgatcttactggcaatacagtccttatctaggcgaagaggtgattggggagattcaatttcagcgcaccaggcagagggaatggaaggtacaagtacttgcagggaaggaagtgggtttggaacattcacagaagggagggaataggcagaacccagggcctgaggaccaagggcaaccactgaagatgctaagaaggaatgactagagtggaaaagggagagccaggactgaaagggattctgacatgcagagaaggtttcaagacatttttctcttcaaaaattatttattggggtgaaatttacataacacaacattaaacacattaaagtgaacaatttattatattcacaatgttgtgtgaccactgcctccatctagtttcagaacatttcagccactccagaataaaatcccttatgctttaagcagtttctccccattctttctggctaccagtccctggaaatcaccaacctgtgttcttctcaatggatttctctcttttggatatttcatataaaaagtcatacaatatgtgaccttttgtgtctggcttcttttagcataatggttttgaggcttatctacattgtagcatgtacttcattcctttttattactgactaatattctgttgtatagataaaccacactttgtttattcatttattagttgtggacatttgggctgtttttgccttttggctattgtgaatagtgctggtatgaacctgcatgtacatgtacttgagtaggtgtttttaattcgttttggctattacagggttatatgtaattttgtttaacttttaaggagctcaagttacttttaaagaggccagcattatctcatgtgccaagaaatcatggactaaagataggcaggtggatttgggtgaaaagtcactgaatccctttgcatgagcagtttagtggaagtggggttggggagggcccctgactgtaatgagtgcattggtgtccagcctctaggcctccacaggagcctccagaaagtattgctttgaacagggtaccacctgctcagaccctccacattttctcaaaccatccaggatttttcctcagcttatcttctcctactaaccactacaaattgcttctcagctgaactactacacgacatgctctctgcatgagaaacgcttagataccttttccttgagctgtttcctctttgcccaacagatcctccttgtccttcaaatcctccctcaaatggcaacatgcagcttccctggaggccttcttccagccaccctgcttcctccttccctgagcctccatttctctttgggaggaccactccttgggacttttcctatttctccttgagggtcaactgtttctggtccaggtcccaggcccctgcatatcactgaagcttttcaaggggattggctgtgactcctacagcttctggccccatgcttcacacacttgagtcctcaggagagcttgcctgtcattgaacttttaggaaacacccacttcctgtgagcttttcagcagggtggtcctcttatgtgttaactttgtttctcctttggttagtagtgtgcttggaaaatggggttatcctatcaagaagctgtaccccaaattctcttgaaactaaaggaagtagctcatttggaacttcctgctgttggccgtcatccagaaccttctagttagacccaatttgtatcaattagtccacagaatattggttgtctgttttctcaaagaaaacctttctgaagtttttcggggatagtggtatttcttcatggcacttttttttttttcctctagttaactaaagctttatgatctaaatggaagttgggtcacccttgtattgtttaagaagggtgtacatcagttacaatgttgactgatgtgggaggttttggtgggtggagcattctctatataatccttaagctttctgaatatacatgaaaatgagttaatctcttcctcttttttccccacccttcctgcctagcttttataaaaaggccttcttccaaagtctcttctccttccccctccctttctgcccttcctgtcttgggatctctgtgtcttaggatgctttttcctgtgtaaggtcacctcttcttcctggtagggcatgtaaacattcatttcttggtttggggcagcattggattctgggaatgatattgtgtacctggcttgttgatttaaaaatttgatttggacaatttttgctctttataagatttggtcatttgttgtattttggtgatttatcttgaaattgttctttgcttgtatgtgaagctcttgcttccttgacttattccaaacagagatggtggcaactgggaactgatagtgattcagcaagtacttgttggtttgatttaatgttttgctgacaaaaaacattaaaaaacagaattttagataaagttttataaaggtgtattcaaatatatttatctaaggcattttaaaaatagaatggtctttcctaagtataaaaataactttatatcatggtatcatgtgcatctgcttctagaatcctagagacccttgttcaagatagagaagaaaatttgtcccttggcatagtgattgcatttgattgtgacatttggtcccaaacagttctgatttcctatcctcagaggaagcctttgacaagttgcctcagtctacggttcctgagatgcagcgtagtaatttggcacctgtcatcctgcagctgaaagcactaggaattgacaatgtcctcaggttccacttcatgtcggtaagtcctgcctgctgtctggggccatagggaggctagggagctcacagggggatgtcaggacattgtcgtagggcatgccatctttcctttttttccctactcaggtcatgtgttgtgtgtctgctttgcaaccaggccctgtgcaggacgtaggggaaaacagccagacaaggtagcctcaattcctattcttacatagttcctgttcttgtctgctggggaatagagacaagtaagtgggtaattacagagcagtgtgcccagggctctgagagacaaaggaagggcctcccaggtgaaacctgaaacccaaatagaatctcaccaggttaggagtggagagttccaggacagctagtctttgtagaggcctagatgcaggagtaccatgattgggggatccttcctgcagctttagatagagctgcaggaagacccttgtgcctgattgcttcctgagatgatttctaggagtagaatgactgggtcaaagggccgttgtcctgtttagggtcctgttacatggccagattgctttaccaatgtcaactctagcagtgcctgaatgcccaccttgtggtacttccattgtgccatgttatcttctttgggtttgctgatttgattggccagagagaggaaatcacctttattataattatttttaaatttttcataagatagatttttataaaaacatttattagtcagtttttatttcttctgagttgttaagctatttatctgttagaatttgtgtcagttagtgattttcaagagtcctttgaatattaaagacattaatttttataatatttcttacaaatattttctatttatattttactgttttttttttaatgtgtggacattctaaacatattcacagtaatctatttttgcctttatgatttctttggctattctttttttctttctttattttctgagacagtctcactctgtagcccaggctggagtgcagtggtgccatcttggctcactgcaacctctgcctcccaggctcaagtgattcttgtgcttcagcctcttgagtggctgggattacaggtgtgtgccaccacgcctggctaattttttatatttttagtagagacaaggttttgccttgttgaccaggctggtctcaaactcctgagcaggtcaggtgatccaccccgtctgggcctcccgaagtgctaggattataggcgtgagccaccacccccggcctctttggttattcttgcccttatgaagtacttcttatatttgggtcagttaatacatattctctcatattttcttctagaatttttatgatttgagaactttgttttttcccaactgtatatgatatgacaagtctggaaagtctggattcttggatagtaaagtccctaatgtcatatgtgatggtaaactaggtgaatgaaagaatagaacatacaaatatcaactcccccaaagaaaattgtgtacttaccataagtatagggaaaatggaccctttgattattggtgtagagtagaagatattataaagaaaagataaacaggctgagcgtggtggcttatgcctgtaatcccagcactttgggaggccgaggcaggtggatcacttgaggtccggacttcaagaccagcctggccaacatggtgaaaccccgtctctactaaaaatacaaaaattagccaggcatggtggcatgcgcctgtagtcccagctacttgggaggcttgaggcaggagaaacgcttgaacccgggaggtggaggttgcagtgagctgagattgtgccactgcactccagcctgggcaatagggtgagactctttcttaaaaaaaaagaaaagataaacagtatgtgctgatttgaaagcttatgaaaagccccgcatgtaaaattaaagaaaaacatacagtgacagaaatgacagatcagtatctcaaaaaatatgaagagtttttatatgcacatcatttacagtaaatattcactaaataaagctaaaggaaaaaaacagcacaaattcaaatttcaactatcattaggacatgttgagcttctctaggagagaggtgactgcacgttgatatagctataaaggatgactttacactaattttttttttttttgagacagagtctctctctgtcacccaggctggagtgcagttgtgcgatctcagctcattgcaacctctgcctcttgggttcaagtgattctcgtatctcagcctcccaagtagctgggactacaggaaagagccaccatgctcggttaattttttgtatttttagtagagacggggttttgccatgttggccaggatggtcttgaacgcctgacctcaggtgatctgcccaccttggcctcccaaagtgctgggattacaggtgtgagccactgtgcgcagttgactttacactaattaaatgattgagtataaacaaaaatggtgaaatcgaaaactgccacaatttgggaaagtaaattcctcccatgttataccgtttctgtccccatggaggactttctgacaacatttaatgagccgtagaaatgtctgctatttcttctcataaaaatttctcctgaaaaaataattcagaagaagaaaaaaagcttacatatgtgataatgcttatagcatttatattacatttaaaaatataaataatgaaaattatcgtaaaacttttggacagttgaaaaatgaaaaaaaaaatacaaatttatcttcacatatttccttctggttattatcccctgaaattgtggtttttatgattgaaattacagagtacatataattttgtatatttagcaatgttatttacaatggtgaaaaactggaacaatttaattgcccagcaataagaaaattgacttttttatggagtatgattgtcatagagtattatgcagccatcccaagtagttactgtgaagtttgtatgggtgcaagaaacaatgaaaacagaaaaacatgtagtgagaagaccacactaaaactatacataaacagtaattccagatatgttaaaacagtgtttctgtattatcccaaatcagttgaggtcacagagaaatactagtgaatgtgattagatgaaaatactatggataagatttttgtggagagggggataagttttttttgttaattgactggaaatcgggccaggaattgagtcagagctgaccttgttagctttttctgtaattgttaaaagcctagttcagagattgctattcctgttacctcatccactctcagtataaaagatcccacagggtttaagctccttcatttaagtgttgcccattttgcttctttgtagagaaagatgttgtaagcaccaaggaagggctagtggatcatttacatgatttgctcaatggtgatttgttgaatcctctctgtgtaatgaatccaataggtttagttcctgccctcgtgtgttcacctgtgtgtacggtcactacaacttttaaaaaagtttaactttggtctttggcaaacaaagtagggaaggtagactgggaaaaatgaggcctgagttcagctttgccaccaactgcctatatgaccttgttcagctgtcttttccttattgcagttcagtttcctcatctgtaaaactgagctaaaacaatgtgatgaataaaatacatttgttatgtgaatgcatttagaaaaaaatgctatgtgaatttagaaaaaatgcatttagaaaacatcctatgcagtttaaaaatgtactgtaattttattacctgggttattagaaaccacataatttagagagaaaaaatatgatgcctggcacttaggtgctcagtcaagatttgtagaaggaaaggaggtaaagatctggaaaatcagactgaggctcactacatcagctttgcttatgaactttaaggtctctagagctattattttttgaaattcagattcgacatatgttgtagtttccagacagggattaagaaaaaacaaattcagcgtatgttatttacccaccacggggcctggagtgggtctatgggggatgcaaagataaatcatccccgagccctgagtgctgcagtgtcctggggccccrgtgtggtagaaggttgagtctgtgaagtaaaaattagaaatgtctcaggagggtttaaggaaaatgaagaggtagtttaagatagggacctatcacgtctgatggaggggaggatgagggagcacttcaaagggaaatgtttcatcaagctgagccttaaaggccaagcagtacaagggtgcctagaaggacaggaaggacatttcaagaggtgccaacagcaagaacagaaacatggaggctgggaagaatggggcatgttagaggggagaatggatttgaaaaggaaacagccacattttaatgtttgttgcccaaataaattgattcaggaagatttttatgttttttccagccccctccagcacagtcgatggttcaagccttggagttactgtatgctctgggaggtatgccagtttctctcatcattctctcttattatgtgttgtcttttgtgatattagtgaggtcatattcactttagggatnttagtatcttcaggaatgggattggttctccccatatatataatccccctaatgatactttattgaaataggaagttgggwccataattagacacatgaaagctaattatgacagccagtatataaaacatgccagttcgtcagaagctattagtaagaatcaccagggctacactcctaagagatgtctagagatcagcagttccctaccaggatgtcagatcttacctccccagaccttttttctccacccaacaaccacatccttaaaaatcgtggctcagtattctctccctaaatcctcttcatttcattcctggagttgcttgtggagaattggggacattatcagcttctaacaccatgttacgggggaacttctattcagttgtcgattgaagatgttattaggttggtgcaaaaataattgtggtttttgccattgaaagtaatggcaaaacccgcaattgcttttgtcccaaccttaatagcgtttatcttgacatagagaaaatcatagtctgaattcaccgctttggggagtactgtttcttctgtgattggtaccacaaatgaatataatttccaattttgaattaagttttagtggagattttgctttttgagatttattttgagtgttactttttttttaagtagctgtattgaagtatagtttatgtactatacaattcactcgtttacagtgtacaaattcagaggcttttagcatattttcagggttgtgcaaccatcaccacagtctaattgtagagcatattcatcacccaaaaaagaaatctttacccattagcgccgaacttctcattctctttccccctagtcccccagcccaaggcaaccactctctggttcagtctctatagagagtttttatctctataggtgtgccttttctggacatttcatgtaaatggaattgtataatatgtggtcttttgtgattggcttctgtttcagtctgtctgctgttgctataacagaatgccagaggctgggtaatttctaaagaggtttatttgggtcacgattcaggtggctgaaagctccaagattaggcagctgtatttgaggagggcctcagcctgcttccactcaaggtggaaagcaaaaggagagtgggcgggtgcagagatcacatggcaagagaggaagccaggaagagaaacagaggaagccaggctcttttaagaacctgctgtcatgggaactaatccattactcaccctgggtaagggcattaatctgttcatgagggatcaccctcatgacccatacacttcccagtaggccccatctcccaacactgtcacgttggggatcaaatttcaacatgagctttggtggggacaaactacatccaaaccatagcagcttctttcatttagtatcatgtttcacaggttccttcatgttgtaacgtatattcataccttatccccttttatcrctgaataatattctgttgtatggatataccacatattttttatccattcattagttgatagacatttgggttgtttccactttttggctgatataaataatgctgctataaatattagcatataaatgtggttttggtggacattcccaccagcaatgtatgagagttccagtttttccacattgttgccaatgcttgtaattgtcttttgtgttatagccatcctagtgggtgtgaaatggtatctcttggttttgatttgcgtttccctgatgagtcatgatgttgagcaccttttcgtgtgcttgctgcccatttgtaaatcttctttggagaaaagtctgttcaaatcctttgcccatttttatgtgtgctgttgtctttttttttttttttttttaaattgagttgaagttcttcatacattctgggcacatattcttatcagatatgtggtttgtaaatatttctcccatttttgtgttttggctttttacttacatgtacttactttttacttattagtattgtttgcagtacaaaaattttaagtttttgtgtggttccatttatctgtatttttcttttgttacgtgtgcccttggtgtcatgtctaagaaacttgcctaacttgtagtcattaagatattctcctaggttttatagttttggcccttacattaggtctgatccattttaagttacttttttggtatggagtgaggtaggggtccatcttcattcattatgttgattttacttctctgtgaatagccaattactgatttaaaagatctccagtgatttaaaagaccttcagctggatttacataagatcagcctggagtgaatgtgtgttggagaaggtttccacccccttcttctcaagcatgtaatrggaactcgaaagcacatttcctgggctgatctgtagtgaggatgagagaatgttgacagcataggagtttttatttgggctggtttttctccagtcaaacagaatgaaatttaagatatttcctatttcttcaataccctaaataagctggaaaagatagagggaccccccgcctccccccgccagcttcatttgatttcaagctgaattaccacctttaaagagatgtcttactgagctctgccttactgtgagatcttgcagcgtttaagtagtaaaacagtagtctatatcttgggaatccaatacctggatattggcaaggtattgccaatagagggcaagaagggcaggtggggagttgaaagagtcagcccagttcagcaaaatgttcaggaggcagttgcatgaacagggctggtgttggcaccagagggatctgggttagtgtttagattccaagttgctggccctgtagttgctcattgttgttctcattgtggctaataaagagatactcaagaccgggtaatttataaaggaaaggtttaatggactcacagttccacatggctggggaggcctcacagtcatggaagagcaaaggcatgtcttatatggcagcaggcaagagaacttgtgcaggggaactcccatttacaaagctatcagatcttgtgagacttattatcacgataacagtatgggggagactgcccctgtgattcagttacctccactcggccccgcccttgacatgtttacaattcaaggtgagatttgggtgggaacacagccaaaccatatcactcatttagtatgagaagggcacaggacacgggatgccatygataccatcctggcacatctgtggcctgtccggtcctggaggtggtagaaagtccagacagtgagggggcaatggagatggcagagaaccaggagagttgggggccgggagctggcgaagagtagttccaagaagcagcggccagcagagccgagtgctgctgaggccatcaggaagatgccttgcgtttggtgctacccagttgttaggttcttgggaagagtggtctcttcggagtagtgggaacaggtgaggctcttgtggattgaggagagggtacaagcaggagaaggctgcagggggntttccttataattaagtccttgaatagaagtctttagaagtatcagttttttaaaaaattgggtattcaagagctcagtggagatcttttcttcttttaaggtaatggcactctagtgtcaaatggagtttggtgtagtgcatgaatcatcttttggatactttcttctttttagcatacattatcttttattctctcagcaactgtgtgccttccaacacaatggtacctgccttctgatttcttttgttgttcttatggcaggtctggacaaagactgtcgyctaactgaaccgcttggyatgagaattgcagagtttcctttgaatcccatgtttgccaaaatgctgcttgaatcaggtgggtagagcctgatagcttgaattgattttattttgactgtcagaggtgttgtttgcctgmattctgagcaccctggggaagagggtacaatatggtaaagaagtatatatatatctgtaacataacatttattgttttaaccattttatgtgtgtagttctgtgatacaaagtacgttcacattgttgtgcaaccatcagcaccatccatttctagaactttttccatcttttccattgaaactccatacttggtaaacacaaattccttattctctcctctgccccgcccctggcaaccaccactactttctgtctctatgaatttgactgctctgagaaccctcagaagtgcaatcacacagtatttgtccttgtgactctcttgtttctgttagcataatgtcttccaggttcatccatgttgtagtatgtgttaaaattttcttcatttttaaggcggaatagtattttattgtatatctataccatgttttgtttgtttatctgttgacagacactttggttgcttctaacttttggctattgtgaataatgctgctatgaacatggatacacaaatatcattttgagtccctgcttttatgtttattgggtatatagccagaagtggaattactaaatcatgataattctttaatttttaaaaatgtatttttaattgacaaataataattgtatatatttatgagatagagtgtgatgttttaatctatgtacacattgtagattcagtcaagcaaattaacatattcaccaactcaccaacttatcattttttttgtgctaagaatttgtgctaagaatgttaaaattctattctcttagcaattttgaaatatacgatacattattattaactgtggtcaccatgcagtgcaatagatcactaaaacctattcctccagtctaactgaaactttgtaccctttgatcaacacctcctctttctccattcaccccctgacccaggggatctcccagcctctggtaaccacctttctactctctgtttctatgagattgacttttttagattccatatatgagtgagatcatatggtgtttgtctttctgtgcctgccttatttcacttggcataatgtcctccagttccatttatgctgtcatgaatgacagtgttctcttcttttttaaggctgcatgttatttcattgtgtgtgtacatatttatataaaccacattttctttcttcattcatccagtgaatggacacttggattgcttccaaattgtggctgttgtaaataatgctgaaatgaatatgggaatgcagatatctccttgaaataccagtttcagttcctttgcatatatacctagaagtgtgattgtcagagcatataagtccatttttagttttttgaggtagtgccctactattttccattaataggtgtaccattttgcatttctgccagcagtacacgagggttccaatttctttgacttcttcagatttttgtgaggacatgggttctaggttaaaagatctggaagtcttctcgtaattagaaatcaaagtcatctagaaagtataatttgtttttttacctctgggaaagacagtttaattttttcttggttttgtctaacttttatgtcaactagcaatttatgaagatgtactttagacccagtatggggaaagctaactaattatgttttggaacaaccacttgttctcagccttccatttagaaacaggattcttttttttttttttttttttgagacagtgtctcactctgtcgcctagactagagtgcagtggcgcaatctcagctcactacaacctctgcctcctgggttcagttcaagcaattcttgtgcctcagcctcctgagtagctgggattacaggcatgtgccaccatgcccagctaattttgtatttttagtagagatggggtttcactatgttggccaggctggttttgaactcctgacctcaggtcatctgcccgccttggcctcccaaagtgctgggattacaggtgtgagctaccacacctggccgagaaacaggattctaagtgtggactggggaagtgcatcattcatgagatgggaggtagtggggagatgggacgagcagtgtagtgtactctgccttgtgccctggagtggtgattgctggtgactgtttccaggcgttccagcagcccccagcgtgctttgctggtctagttgtgccttgggcttcccagctgagatgaacccttttgagaaggaagccacttcatagaaggggtcaggagcagagaaacagcagaaggggcacaagccgctcattccctgtcccctctcggacttcctgccaggattccagatgttcccacaggagggtagggagcaggtgcggagctgacctgcccttagtgatggggccagtcttgaccttggcttatagtcagagtcccctatatttcagctgcagagggcagtaacacctccttttttggagtccttcaaggctactattcatctgggttacatatgggacttcacatttggctgagtgaaatatttttattttataaacttcatttttttgtttttatttttctgagagagggtcttgtgctgtcaccctggctggaatgcagtggcgtgaacttggctcactgcagccttgacctcccagctttaagcaatcctcctgagtagctggaccacaggcacataccaccatgcctggctaattgtttaattttttgtagagatggggttttgccatgctgcccaggcttatatactatacactttaaaaattaagctctagaaaaaatatgatcttagtcttcagtgtggtgcaaggaaagtatcagaaaatgtctttcacttcttgttggcacattatatggttgaaaccaaacatgctttttgttttacaggaaacttcggctgttctcaggaaattctaagcatcgctgccatgatgcagatccagaatatctttgtggtccccccaaaccagaagtctcacgcagtaagtcagctctgtccccaggctgtctgtaccagtctcttttgctttgagctttcgttgtcaaaactgtactcaggaactgctgaagacagagctgtacaaatgtgatctgctcatgttttgagtgtttattccgtgcttgatgttgtgtcaggtgttttgcaggcatcattccactttatcttcattataagcctgggaagtagatattattatcatattttatttatttatttatttattgagaggaagtctcgctctgttgctcaggctggaatgcagtggcgtgatctcagcccactgcaactgcactctgcctcccaggttcaagtgatgctcctgcctcccatgtagctaggattacaagcgtgctccaccacgcccggctaatttttgtatttttagtagagatggggtttcaccatattggccaggccggtctcgaactcctgacctcaggtgatccgcccttgacctcccaaagtgctggtattacaagcgtgagccaccgtgcccggcctattatcatattttaaagatggaggcatagagaggttaggtaactcattcacagttgcacagccagaattgttggctctggattcacagtccagagccccacaccttaaccattgaactaccaacttctagtttctgtcagggaaattgtcattcagactgctctgctagaaaccttggtgggcacattagtgacataagaagtcaggtgccagggtatagcaggctgattctgggcaccacacgacatcatggtcatgttgcaggtgggccattataagctagagagatccaatccccacctaaggtgcaggcatcagcaatgactaattgagtgaacactggaaagacggaaggacaagttttgatactgaagagatagatactcagaagtaaggtgtgttgatagaggtaggtcagagatgagttcaaagtcagttcctgtttgaaagtcagagaattagcagccttatgcatggaggggctgaatttgtatgtgtaatgaggaggagagagactttcttagggattgttgggatcctccttgtcagttgtataactatagattacaaagtttttctgcctctgtgcccagatgcttatgtctgtttttgtttagttttgtttttaattaacctggaggaggagagagacaagaacactaacattttatcaaatttctttgccagataccttgtaataaattatcttaatccacagcaatcttgataggtttagtttcctgattttacagataaggaaatcaaggctgagagaggttaagtaaccaagctgagttctttcaagatatggcagagctagaatgctgcaaactaggtctttctgaatccataacccacacgctattcaccatgcaatattacttccagtgcaaaagtcaatttctttctttctttctttttttcttttttgagacagggtctcgccctgttgccttggttggagcgcagtggtgcaaacatggctcctgggctcaagcgatccttccacctcagcctagtagctggggcttagaggcatacaccaccatgccctgctgatttttttttttagcttttgtagacatggggtttacctatgttgcccaggctggtctcgaacttctgggttcaggcaatcctcccaccttagcctcaccaaatgctgggattataggtgtgagccaccacacccagcaaagagtgaaattctgaatgttgcttcattctttccagattcgagtgcaccgtaaatttgctgtggaggagggcgaccacctcactatgctcaatatatatgaagcatttatcaaagtaagcacaactactgctcgaagtgccgcctcaacacaccaccctctggaggtgatctaggagggaggatcccagaagttcagttcgtaaaggaatgtccaagagagcccttgattttcctgttagatttattgccagtacttctaactggtgggtcgggctttctgcctgagtttgtggtgaggtattgctgagaagaacacaggaatcattcattgctttcccttgcttggagatatggtacactagtggcaggccagtggcccagcctcacgtcatctcacatccactgtgcagtagacagaaaggcaacatttgaataggaagttctgttacattttctgccaggtgaatgaggctgagagcaacttgtagtcctgggttgaatcttcaaagctgtcccagctgccatgagaagacatttagttgagatctgtgcatattcacatatcccacccatatttagctataagtgatgttaattttttattgttaatattctttaaaactaagcaaataatacagcttaaagttctcatgaaaaattgttaataaaggtgatgaaaatgatgaaaaaagtaaccttacataaaagaaagggtataatacttcagatttttaatactcatttcttaaatactcttttagaagtgaagaaatactaaatttttgtttaccagtgatttgaggaagattattcagttggtgaaaagttttcagaaaaaagaaattcactctttttgagacttacggcttaaatcagttaaaattcatttgtacaggcacaatgtatcatctgcagtctgaagctttctctaccactagaaagtgggtataggtctacattgtattattctatggttgccttcttggaatatcttctattaattacattttcttttttaaagcactttaacttacaatagaatttcagaggtacatttccacagcaataatttactctaagacataatgatcatacttatgaatgcagaaaaaattaaatactgttgatagaaaaatcatgctttggggacaaataatagtaatttgtaaattatttctacattggcaagtgtcatattgttggcttctagtataataaagtgatacattcaagcatgccaaagaagaaaagttgatttacaaagaaccacgtggagaaatggttctttctgatagttcacatctcatgaaggtatgtaagattgaaaccgtttctgcgtgtcattaagttctcatttgccctttagtgtaaagagtgaggttgcagagcagtcagatgtgtgcaaggttgttaacatctgttttgagagatggggcawaaaagggccagttcccatctttagatcttaygccgttgaacagcacatgggggaagagagaagaatgatctttacaacatagccttagtcgagaacatatctgttttctaactccctctctctgggttgttctgtagcacaataaggactctaaatggtgtcaggaacatttcctgaattacaagggtcttgtcagagctgcgactgtaagagaacaattgaaaaagcttcttgtcaagtttcaagtgcccaggaagtctagtgaaggtgagaagaaaccgtcccagcnggtgacctcccttgcttcattctgttgagttgtcttcctaaagttctcatgctgggctggtgcgaggcagtgtggcgtgctctgtaccaacactgggttttatattttgagttgcctgcatctgtgaaaagctgaaggtcaagttgcgtattttttccaaggaggtctatttttctttctgatgggcattcttactaaaggaatttcatagcccatgacaatacttaagaatcactaacagtcacatcagtgcacatcatgtcattgattttcccatgtaggctttgcaagaaaaattactttttgatcagtgatattagtagctattacataaaaattaaattttatattcaaagacaagtattattaaagcaagtgctggatatttagcctaggcagccactaaaggtaagacagaaaagtactatgtaagacgtagtctctggcctctagcagtgacagtgactactattaatcagggacacagtaggttacgctgtggcaggggttctccaaatattctcttgctcaatctcgcactctgtgaggtgtcggtaatgttatcctcattttacaattagtcgtaagatcctagggagaaggtagattaaattcaggaccacgcaactggtaaggaggagagccagatctgtatgtggctcagaagtctacgcttttaaggaagtgacacacccgcctcagcagtcagcctgaaagcctagtgtgccaggtactcagccacatcctcagcaccattagtacttggtaacatttcctgagtgcttataagtggctagacagtgcactgagtgttccatgtgtttattaatttaatgctcacaacaacgctgtgaaacgtgtgctcttttccccatcttataggtgagaaaagcgtggctaagaggtaaaatgtaacttgctgaagttacacagtgagggtatgatggagtcagaacctgagcccaggcggttccatttaagtcttcttttgtctttatactaagagcaagtgattaaacaatgacggagtcttggcttttactctaagggaacagtgtaatgaagggagagattcatatggatagacaaagtactaagattatcagtcctcttcgaagttaaagtagtagatactttagtaatcatagaagacgtgctggcagatgtggaaggaatgccgggaagaaggaatccagagagggctagcttgggaagtctttcagcttccttgaggtgtggtgggagtccggtcaagctttggggtctggttgaattagaaaatggtggcaaagagcactctagggaaggaggactggagacaagtgcttggagtgaggagtatatgagacgctcagagaatatttgatgggtgaatacactcacgagagagggaagagttgaaacctgggccattgagccatgttggagtcattgatagaaacaggatgcttacaaggagcacctagttggagagcagctcgtcaaacgcctgtcacccagcaggtagatgacagccttacttcagcaattggtgttcttcacctgtgtttcattatcagacccctgcccaggagaaaagttaaatttaaattctacccagcctgagaaattaaatactaaggaataagattttgtagggtaggattgagctttggagggctaccggccattgtagtgtctaagatgctcccctccccctgcctccaagaaccagtttccacccctttggaagtgatatcacccctgtttagagtgcatattttacatggaaatttcttatggacaataggagagaagagactggatatcggattagatcatatttagacatgtagatttgagattttatcagctcagtgcttaggaaaaatacagaaaatcatggagactaaataaattacatgcaaatttaaaacatctaagggttaaaaaatagaaagcaattagtgaaagatactttcagcagtcatgagataaatgataaagattaaaaactttattatagaatgattttatttaatatatttaggaaaaaacagttttcaggttgataaatgggctaaggattagaacaaaaaattcacaaaagaagaaatatgccratagtaatcaaataaatgtaatataaaagaaggtaacagaaggtracactttttgccaaaacattgctagtaagaatgcagtgaaactgccatttttatatattgttgatggctttggaaatagtaccacctttatggaacttacttaccaacatgctttattccattggatctaagataccatcatgtgtaagaaacatcgttattttatgtgtcaccaaagaaaaaaaatgctgccagttatcattgtaaaatgctgtcctaatttcagtgaattaaagttagaaaaagagcgagtcttaaaattgatgagatgtgatatgtcattaaccataaaaataacattagccttttgcacaacaatttggaatgtatcctatggacatcatctaatagtggggaagctttattcatggaagatgttagctgtagcaatagaaacaccagttaaaatggaacatttgaaaaatttgaagaattacttcaattttcaaacactagctcataaccacagaagtaacgttgtatactatctccagtttgtgttttatagaaagaacattgttgccatatgacactcttttacaaaggagttctgaggtcactgaccagcctgcagagcagcactcttaggttctggtgcccagccatggtccagtcatctgtggcttaggggaggttggaggggtcccaggttcaaggagcagaccagcattgttgtcagcagcagttgtggggagtgggacctccttagatggtgctggggcaggcatccagcattgggaagggtagggctggagccatttcaggagagggtttccaggtgtcttgaagcagcctrgggtggtgctgggagtggatcctgtgcattagagcacacggagcctagggcaggcaagggtttcacccgcctctctgttggctgcctatgtaggtgacccggatctggttctgaggtgcattgtctccggcttcttcgccaatgcagcgaggtttcattctactggagcttataggtaacatgatacttggtgaagtcatttgttaaaggaacaatcttacaaatgacccaaaccccacagaaagctgtgcagagatagtaattgcataattatttgtaatttctaccatgtctccttccaaaactgagttgaggttagcgacatagctttaagcaaaatatcttgactttctaaaaatgattctcacatattcagctcatctatatgttgtatgttttagaaggatgacaattatacatcttgaggctggtaatatttcaattctaatgayagaataatatgacctgaagaaactattaaaaataatgtttctcagagaagttattttacaattggctagtttattatgtctttagagatctgcacgactgaagtcccctcccaccctggtatagtgtggccacgtctggtgtctttggaggtagccaggtgtttctcatgtgctggatgtgcctcctgctacataacctgattcttccagttccattttctaggcataggaaatcactcattgatgccttcctaatggtctttactatattcaaatgcagtgaaaactaagcatagcttaggcatactgtagcctgtcagtatcatgattctccaaactaatcattccagtgctttgaattgttacttttattctgtcttttctgtctttggctcattttagtttcataacctcagtgtagcctcctaaaagtgtagctatcatcattttctgttctttaataagagaacactccaaagaatttctccccagctcttctatgtattattttgtcattaattttttttcccagagaaaatattactgccctgttatcttgaggtcagccaagatatcccttgtcctgggctcctgttaatgagtccagagttgcactgagccttttttaattttgacagccagatctgctccatctagtatcctagtagccgactgttggaactgcaggatagcactttacaatgatctctagtatgttctctttgttactccaggcaygttgtagcctgtcagtattgtgattcatttgcccattgtatgagctcacctccccaccctgagttgtctgtatttgaggcaacttgtccatgtggaggcgacccccacggtggcccgagatcttccctaaggagtgctgccagcttgtcatcttgattgctcctactctcctggagagttagcaattttgactagcgtttggaaaattcttttatcagtgtccttagcaacaatgtgggctacctaagaggttccaggctaatcattcctttgagacaacatttagtgttgatcagctcaccaccccctggtaggacagcccaggaccccaggacgctggctttattacaatgccgacgaggcattccgtcacagcacttgaagcacttcccccaagaaacagatcattctactgagttggaattggaagtactatttcagagaaattaatagtccagtattgagcttttttttttttttttgagatggagtttcgctcttgttgcccatgctagagtgcaatggggtgatcttggctcatcgcaacctttgcctcccagtttcaagcgattctcctgcctcagcctccggagtagctgggattacaggcatgtgacaccacacccaactaattttgtatttttagtagagacagggtttctccatgttggccaggctggtcttgaactcccgacctcaagtgatctgctcgccttggcctcccaaagtgctgggattacaggcatgagccaccatgcctggctgtgagctttcttttttcattatcgttacgtccccctatagtcattatctttagtatttaactttgctttttagattatagaagaaatcacatgtattatttccattccaaaggaaattgttttgaaagagcacctgcagaagatacacataaacataggcagagcattttattcctaaatgttttttctaagtgtccgcgtgttgcttttctcctcttcgctttttccacgtgatttattcttgacttctggggtggcagccaggagagggatcaagaaaggttgcaagagaagatggagataattgttttgcttgtgacgagttcagtctgcatgcttttttggtaatattaaaaatatctgtgggaaagtcttgctataagtatttaaaatgtgcttcagacaaaattcttctatgttccaaggaccatccgtgatgaccatgagctgcacatacaccctgygtcagtcctctatgcagagaagccgcctcgctggtaagctcatcctgctgcttagcctgtgcctgctttgaacagggccatgttcttgtttttctcctgtacatgtttcttgacatcgcctctagaattgctgctctgggccgggcgtggtggctcacgcctgtaatcccagcactttgggaggccaatgtaggcaggtcacctgaggtcaggagttcaagaccagcctggccaacatggtgaaacctcatctctactaaaaatacaaaaattagccaggcgtgatgggcacgtctgtaatctgagctactcgggaggctgaggcaggagaattgcttgaacctgggaggcagaggttgcagtgagctgagatcacaccactgcactctagcctgggtgacagagtgagattccatgtcaaaaaaaaaaaagagaatttctgctctggcaaagagcttcttaagcaaacagtgatatttgtctactcactcatccactcagcaaacgttcattttcaaccactgactggatgcttagccctgcatgaggcacagctatgcagagatgaattgggatcccagctcacggttcttttttttttttttttttgagacagagtttcgctctgtcgcccaggctggagtgcagtgacggcgctatcttggctcactgcaacctctgcctcccaggtccacgtgattctcctgcctcagccacctgagtagctgagactatagatgtgtgcaatcacgcctggctaatttttgtatttttagtggagatggggtttcactgtgttggccaggctggtctccaactcctgacctcaggtgatccacccacctcggcctcccaaagctctgggattacaggcatgagccactgtacccggccccagcccacagttttgacatagggacagacacagagtcaactaccttaggggaagggctttactagcagcatggatgaagtgctgggctcagcacatcatgtgccagtgagagtcagggcaggcttcatggaggagataacattcattctgaacctggaaacaagagtgttcagtcagaaaggacccggagggtattctaggtagagaagtagcaggggcagagccatggaacataaaggaacctcatgcgtttgggaagtggggaatcattggtatgggtggcccatgcaatggtgctgctctgtaacactgcctaggaagaaagaggtaagcacagaagtctagagtaggcctttagacatctttataacatttcaatggttaagtttatrtttgtccaatttaataataaaaattgggggcttatatttttcttgtttacaatttcatttttctagaattcatttatattgtattttaccaataaaaagtactgattaaaagtactgatcaaccatggattggattttgtttttttgagacagtgtctcactctgtgtttttgagacagtgtctcaatctgttgcccagtggtgtgatcttggctcacttcaatctccaccttcggggttcaagtgattctcctgcctcagcctcctgagtagctgggattacaggtgcatgcaaccatgcccagctaatttttgtatttttagtagagacggggttttgccgtgttggccaggctggtctcaaactcctgacctcaggtgatctgcccacctcagcctcccaaagtgctgggattacaggcgtgagccactgtgcctggcccagattggaaattttaaagacgacaacaacttgtccttctccaattggaagatggagaagccctgggaaaaagggtggggtgtgtgtgaagagagggagagaagatagcggtagatttgaaggcaagaaagtctgtggtcaaacactttgtaccctagaattgcagctttcaaaatgtggtctccagcccagcatcagtatcacctggaaacttgtacgaaatgcagcttctcaggccatgccaagtcccattcaatcagaaactggactagggcctaggactccattttaacaagccctccagatgtttcttttgggcagtaaagtttgagttctgtttccctagaccaaggaatcggatttatcctgtagccactgcagacctagaagttgcttaggttgaaagcaccttggtcggttctgggtttagaaatgttacccagtgaccacactaatgtggtcaggatacgcacactcgtgtgcaggataatttgaagagtgcccacgcctgtcatctcagcacttttgagaggctgaggccagaggattgcttgaggtcaggagttcaataccagcctgggtgccatagccagacctcaactctcaaaaaaaaaatgagccaggcatggtggcacgtggctgtagtactagctactcaggagactgagacaggaggatcgcttgagcccaggagattcaggcttcagtgagccatgattgcaccactgcactctagcctgggtgacagagcgagaccctgcctttaaaaaatttttttttttaaatcaagagagatgcaaaacctcaattttagatcctttttttgctgacttttgggtggttaaatttgggagttgcttaaaggagaaaggcttttctttttcttgcttcattcctaaggagctctgaagggcaaagaaaggttggggaaatagagccagcctgaagccatgccataccattcaggtggcaaagaaagtgccccccagtcacggcctctttgcagggggggcccttctttttcctttgatcagctgagattcacttactggtttttgaggggtggggaaccacagtatggctggtatgtttataacatgggaagccctgaattaacactttggatgtttcagaaactgatatctactcatatgcacacctaaaatcaggggactggatgttatgctcttggctcttcggttgtctattacctgagccttagaaacattttttcccttaaataaaggtataatttatttacagtgcaagatgagttttgacaaatgtgtatacccatgtaacctggacccacataaattatacaatattgttatcattttagaaaattcctttgtgtctctttacagtcagttcccagcctctttcagaatcaggcaagtctttgcctccatttctgcattttctaataaagtcattaggctcagttcagagttctgtaaatgcagatgaaggatccagaaaggtccttcgcggataactgagatgttccagaagtcattgaggatttagagtctcatctgaaaaatggacacaccattacccagcacttaggtcttgaggctgyggtgagcaacataaatgcatgtgtttagcacagtgtctggcacatagagtagaacctgttaaaggttaaaggaaacagcatgtctacctgtggttcctgactgtcatcacaagagggggaaattagctcatgtttctttctcatttcagggtcatctataacgaagttatacagacctccaagtactacatgagagatgtgactgccattgaatcggcctggctgttggagctggctccacacttttatcaacaaggaacggtargaatgaactgagtctgtgccccagccacctgttcacagcctctccatgtttttaaatgtacttttttyctccaatttaatgccctatgtgtgttccccctaggggtgcatagggtggaaaggccattaccatatccccaaaacattctgggaaagcactctagcgtttaattcatagtgaagtgcaattaaaaataaatccccctaatctcataagaaaaaaaaggtatcgctttctcgctttctttctccttttgctcttccaaactatttttttttttttttttgagacagtctcactctgccgcccaggctggagtgcagtggcacgatcatggctcactgcaagctccgtttcccggattcaagcaattctcctgccttagcccccatgtagctgggattacaggtgtgtgccaccacgtctggctcatttttttctttttcttttttcttttttttttttttgtatttttaatagagacaacggtttcaccatgttggccaggctggttacaaactcctggcctcaagtgatccacccacctcagcctcccaaagtgctgggattacaggtatgagccagcaggcctggcctgagctaattaaaaaaaatttttttagggatggggtttcactatgttgcccaggctagtctcgaataactgggctcaagtggtgctcctgccttggtctcccaaattgctgggattacaggtgtgagccaccatgccaccagttcgttttttatttttatttatttatttttgggacagagtcttgccctgtcatcctggctggaatgcagtggcacaatctcagctcactgcaacctctgcttcccaggttcaagtgatactcctgcctcagcctctctaatagctgggattacaggcgtgcgccaccatgcccggctaatttttgtatttttagtagagacagggttttgccatattggccaggctggtcttgaactcctgacctctggtgatccgcccgccttggtctcccaaagtgttgggattacaggtgtgagccaccacgcccagctccttttttaaaagggttacagccctgtgctgtttgtggcctgaaaatacttgctttacatattttgcccaagtttactgttgtttacagcagaagagaaagtctgaaacctttttctccattagggccagaattggactacacaatgtttccaaagcgatatttgaattgattgccacattgaaaaattgggagatttcatattaaacatgaatttctggtttctcttgaaagacatgtttagtctggcaacactaggcttgcgttcctacgtggtggcatcacaggggcttaggggtggctgcctgctgttagtgacatcgccaggtgccgtagtcccatgtcacttgcttacttgcctgctgcactcttggagacatttgaatttgtgaccctgtaaatggaaggatctcctcatctctcctgctccagcaaagtcaagggacattgccctctcaaaattttataatatttaatttttatgtaatcaaacaaaaaccatttcacacctttatagttcttcacacatcccaattcagatatttcagctrgaaagcagatcagcctgcagggactgataaaaatgcagtgtgtgttgtctttgctgaattaggttgataagaataaacctggtgaaagaaaggcttttccttcaaaacctctcaggtggaaagcagcagacttcaggagtcaagagaagggatcagaaaggtaaactagaggttgaaagaggaatggtgcagtggtcaaaatgcctgttaaagtaagaagatgcagacagccagagaaggataagcctgaaattgtcttggattcatttagactcttggaaacagaattagcccagaagctgagtcattttcccttctcagctcaaaattccagtttctttaggtcaaacccacaaagttaaagagcaaatagcttcagaaatttgaagaaaataacaagcccaaatttcttcatttgtctcttctctccaaatggcttttttatttttaagctcatcacctccactgtcatcggagtatttttagagaggctgggacagacctttagaaatcacctagtgcggccgagcacggtggctcacgcctgtaatcccagcactttgggaggctgaggtgggtggaacacatgaggacaggagttcgagaccagcctggccaacatggtgaaaccccgtctctactaaaaatacaaaaattagccgggcatggtggcatgtgcctgtaatcccagctacttgggaggctgaggcaggagaatcacttgaacctaggaggtggaggctgcagtgagccgagatcacaccactgcactccagcctaggcgacagagcaagactgtccccccaaaaaaaaaaaaaaaaaaaaaaaaaagaaatcacctaatacaacaacctcattgtataacgatggtccccaaaccacagagaaacttgtgttgtttcttaactgtatagtccaagggcacttctactattaacttgtccaaagcagattgatttctcaaagaacctccagatctacaggggttgcccatgtatggtagatgttcctttactgaacacagtgcagcacctcacaaccttccacagcccacagatcattcacggctctgttcctggcacctttggagactttccatcaccactgtttttcggaatgttgctctcaccctgtgtggaggcctgaaatggttcagagtcagctttgtttatattcaacattcttcccagaaaaaagcaccaaaaatggccccacaggcacaatggcgtcatctcccatccccaagctaaggccgtggatatctaacattagctgtaggggttatatcaggtgacgtgtagagagagaattcagagaaattcagcaagacctacagctagacaggggaagaacggggtgacctattcagagatttgccttctggcttttaaattatttttccttattctcagagatatcttcattattagggaaaacccttttaacgaggcctttgcaagagcctgtagtagtcctccctcaggtgtaagcagatggaaagtctgagttcttgtagctcatttatacccgggtcctgttcgctctgttgtctctcacgtcatacctggtggtgcgctgtgtcttcgttcacgccctccattttttcagggcctgcagttctctctgggggcgatgcggcttgatgttgtggggccatgtggctgtgctaagtagtgggcacaccagctccggagcagtcagggtgggcattctcatgtgaggctcccactgtgtgttagttggcacggcttagggatctcttggttattgatgattagtaatgggctgtcgggtatatcccagttgatgagtggagggaggtctttcattaaaagcttgtatttacacactctgcctcaaaggcatatttaaggatttctgccacttttggctttgctttagaatgtaaaaaatacttcattttccaatcctattatctgatgcctatgattagaatattgtgcttcgtgttattcataatggtagaaagtgacatttctggggaaaaaaaaaagtgtcactaggaggtgtcctttctgttttcccagcaagcttgtaccctccatgtgggcagaggccrtatctttatctccatccttgagcatgggtacctggtgtgttgagacgcttggtaaattgacttccttggtcctaaagagaggataatttttcttgactattgtcaggaacttcttggagatttgagatcacttccagactgagcccagtctcctgagcacagttgtctggctgcggtgctgtcctctaggctggggcagagggagagtcgtgtctcaaaaagaaaacctttccttgacagcttccgcagagccctgtataaccagcttcagccgctgyggcttgggcctcgggttgctggcggctgaattcaggtcggcttcttcattggccacttgggctttttccttccaggctgtttcatgaacagctcagcatttactgggaaggtgtggaccagatggaagatttgatgtggtcattcatatggggattatgttgcagtctggtttctttgtctaatcaaccccaactgtagtgtcttctcttctgttgcagcacctgtctctgaaagccaaaagggccaaggtccaggaccygtgagaggagcccacagctacagctgcagggactgctggygtcctctcctccatgctgctgcccctggtcccaggtggggtgagctggcaccagctcctgtggaatgtttggttgctctgaagtgggctgcggcctgttcattagtcctttcttcccgctgcccacagcatttgcatccttgctgggatcctggaggactttgtgcatgggcaggcatccttctgtgctgcagcgggcagagtgggagttggctcactcagcacgctcactaacccagcatgccacttccagcaggcatgcagtcctggcccagctctatgggaaacaaggaggaaagttagccactgaaggccaaaacaccatgtggggtggacagagggtttgctgggctggctttgctttccctgctggggccacagctgtgttaaccaatgaggtctgctgccaggtgtgaacaagcatgtctctacgaatgaacgaaacattggggatctctgccgaaaccaccaaagggcatgtctgatgggcacagggtctcccaaacccagtggcttctgtctgtcctcagcccttgtccctgtttatctgcagccaggagacttgcaagggattggtgattgacagagaggactcgtgcgctgttttgtgttagcagaggatttgtgtttcacaggtaggcttagcgtcctctcagagtgtagtgccaggtcctggtgccacgctagctgagcactcaggagagttcatcagctcagatcccacagggcctcctctttagcaggaattcacaacagtttggatgccctaaacttctgtagctcaggaacatcactggtgtatttgtttttttgtttgtttgcttgggttcttgcaagagcgcgtggggacagttcttccagcaggcactggttttgttgccccagggctgctttgctgtgatgatgattgcatttcaacacatgccagatgcagattttttcccccttactgtttcaatgacctttattttaaaaacacatagcttgaaaatttatttttatactgatattagtttggatgtgccacttttggcaccaaacgtgtatgtcrtttttatttccattttataaacatgtaaataatagtgataacttgttaataatagtaaacctttatacctaaagtaaatgtcttccctcccamacctggttttcgtgtctgtatgttaagatgttctaatgaattgttcgaagtgagggcctgacattagctaagaaacttaatgctgtggcatacagcagctttgggatctcagggacacaggaagccccctaaagcaagatgatgtgactgaatgacctcaagacctgattagagtaaactgtgggacatttaaaagaagtcccaaagaggtgctaattcttgccagtttccagttgggatcttcctgtagagaggtcagaaacattatttttcaagtttggctttaggactggggctgatcctaaaaagcttatatggcggtggaaggggaaaggtacaggtttcacaccctcgggttggagaccagagtccactgggagcccggacaatctggagggagcacccagaggcaagcccgtccctgcatgctgcctctacccctgggcgcctgatcctgagcacatgcttcccctctgtccctccacctctcagaaggcagccctccccaggcgacaccccccagtgttgtgtcctgtgttatgtcacagtctgtgatgggtgggacaggtccttgctgtccgaagcaactacaaaatcctgggcccatggggaggcccctttacagtagggttggttaaggctgggaccacacaactcaccagggagtggggcccggcctgggcgagagagatgagagcttttgactttgtctgttgcaggtctgtgtccctgttcccattgtcagcccacagatgtgacagcagggcctagtacctcacagactgtcccccagtacttccacagaattagtcccctcgggctccacacaggtcttcagatactgctagtaaaattccccacagcattgctgtgtcttccctttggagcaagtgagagggcagagagaagctggcgctggaaagcatggaggcggtggtgccctgtaggcccagagatggcagctttctgtgttggtggcttgcagagaccctgccagttttctgccatagctggcttccccgggggttggacattgtcgtcacagggagcccctggttcagccagtgcgctgctcagtccagccagcaaatgttgagccctcaggccatgtgcatggcacagggatgaggcggagacacttgacaacaagtaaccagatgagtggaccaggatggagctgggcgcacgagaaggacagggtggcaggagatggcagaggtccagtaggggttgttaaggccagggctgtatccacagagacttccccacgacaagatgctttcctggtgaaaggacagaccgctctcatgttcttccctggccatccccacattgctgagcatttcatgtgggccatgaacttggagagctgcctagtgccccagctccatgctcccatctccactgttttgtcctggtgtcagcacagcctactgccagtgctgctccagcttcatgggctgggccctgccattcagtgctgggttgtccccagcaccccagccctgccctcagctctgttttccagggcccggcgctgacagtgtggctgacatttctcctagcctgagcaagaatgtctgccgctgaccagacagagggttgggtggctgggggagggaggcgcaggccaaggggcctaaatctggaaaaccgcaagactccgtcctggagccacaagactggatgtctggcagtgaggcctgggaagctgtaagttgtaaaagccccatctcgggtggttctgatgaagtggtgggcttgggaatcctggggacaggagttgaagatgtgaagacatgcagcccaatggacagatagcccccagcggggagatcagagcttcgagatcagagcgtcaggtctgagtgaaagctgataaattgtttcttcacaagtgtgcttagaccccagcccaattccccttacgtgtttccccagaacacagatctgtggggttgggattcttccccaggcaggttgtggcagcaggcatcaatgtcagctcactatgaattttcctgagtcttgcaaaaatgaggaatgtgtagtaatgagcattttataaagcttaagtttattctctataaaagaccatcctttagtgttttttattttttatttttattttttgagtcagagtcttgctctgtcacccaggctagagtgcagtggcatgatctcggctcactgcaacctccgcttcccgggttcaagcgattctcctgcctcagtctcccaagtagctgggattacaggcacctgccaccacacccagctaatttttgtattttcagtggagacagggtttcattgtgttggccaggctggtctcaaactcctgacctcaagtgatctgcctgctttggcctcccaaagtgctgggattacaggcatgagccaccttgcccggccatcctttagtcttttcttggtgctaagatgcttttaggaaacaatggtgatagtagatggtggttttattttttaatgttttctttggaaaaataaaatgtcaacagtcgttcatctatcacccaattaaaaaccaattcaaaatgatgaaacaaaaactgatgtaatcctcaagtctgggaactactgggttgtggctgagtgggccgggcagggcatctggcagcatcagcaccaagatcatcattctgggaagtggatctgaactgccaagcacccacctgggtttcaagtgaactttggcgccgctggaggacatttctatcccctggaagaattcgagttggcaagtctcagccccatatccctttttcacctcaagataagatcaggtattttccactctccaatgattcatctgaattttctcctcagccttctaatttgtgatgaaacaggatgatggaactctggatttcttgtcagtttaatctgtttttttttttctttttttctgagtcattggaactggaaatagccaatcaaataattgcacaaacagctggctactgtggatgaccaggtggaatttgcgtggcagacggtctggagagggcttgtccctgggtcctcacagtcattgctccctccagcaagcaaggatgacacgttgacgtctctggtgaatcctggcagtgttcccttttgcactcttgggtggcattggacttgctggaacagggcgtctccttgcctgcttaagtgcggccaaagagattcccagcgcagcgttcccccaggccctctggcacacatggccaccgctcccacttgtgggttctcctgaaggcaatgagcaggctagggaggctgggaggttcacaagggaggggtggtgcaggcacaggatttaataccccaggatctccatagccaggtgaacgaccagcacaggctactgcccatggcttcttgaccatggcctcatcagtggctccaagtatgaacgtcctagccaggttctttgctggcctcagcctgatgggcggacccatataggacccaaaggtcgcctgagttcctttctgcgtccccaccactgccatcagcctctacatcgccctggaccccaggagagcaggagctggctgataaggccttaccagctcaccctcaggctgtttattttagcctcgttctctggttgcttttcttccccgcattttaggcttgttctgttttcaagtgcggtcttcagtttgcttggtgtctgctgtccctgtgttttccctttgctgttgtttttttgtttttcctcatgggtatgcctcacccctttaatctccacctctctgacctctgcattattttcctttttactgcgaagttttaaaaagaatgcagtcgtgtttatttttaatgctcttcaaaagtattttttcctcgacatttatgttaacgtcttggtcttttttgtactctgcttgtttgtctaactattattttggacatttgttgtcgtggttctataaatattttcttctgtgatcttcttttgtttctttttgttttgttttgatacagagtctcgctctgtcacccaggctggagtgcagtggtgcaatatgggctcactgctgcctcggcctcctgggctcaagtgatcctcccatctcagcctccccggtagctagtaaagacggggtttcttaatgttgcacaggctggtctcgaactcctgagctctagtgatccacctacctcggcctcccaaagtgctgggattacaggtgtgagccactgtgtctggccttttctgtgattttcatcttctactttagtgtattagtttaaaactcaacagttgacttcccattttattttacttcctttgccccccttctcttcatttctttttttttttttttttttgagacagagtctcgctctgttgcccaggctggagtgcagtggcatgatctgggctcactgcaagctccgcctcccgggttcacgccattctcctgcctcagcctcctgagtagctgggactacaggcacccgccaccgtgcctgcctaatgttttgtattttttagtagagatggggtttcaccgtggtcttgatctcctgacctcgtgatccgcccgccttggcctcccaaagtgctgggattacaggcgtgagccaccgcacccggcctcttcatttcttattatgcttaatttgctttagtggttggcaaaaggcctacctgtaggtgtgggagctgggggaaggtattccaaacaaaggattaaatgtcaggaatgtacaaggagctcctataaatcaccagtgaaaagacaactccagcagaaaaaaatgggcacagggaatggaaggcaatgtataggggcagacccaacactccaccaaaccactgaagagatattcaaagttagtcatcaggaaaacacaagctaaagcaacaattagacatcactctgcaccaatgagattagcaacacagtggaaaggtggcggatggagatgcggcggcctctgtgcgcagctggtacggcagtcctggagagccacctgggactactcatgtgtgttcctgccccacagcccagaaactctgcttctgggggtgtgttcccaacaaaattctcacccgggtccttaggagacacatgtaaggatgcttactggtgtgatggatggggtggggactaatgtccatccctgggaggtgtgcagggacaatgtattggatgacactgtggatcagtacagagcaggttcatagaacacagacctgagaaatagctgagtggaagaattaagaaactgctgtaatcccagcactttgggaggccgaggtgggcaaatcacaaggtcaagagattgagaccatcctggccaacatggtgaaaccctgtctctactaaaagtacaaaaactagctggatgtggtggtgtgcacctgtagtcccagctacgcgggaggctgaggcaggagaatcacttgaacctgggaggctgaggttgcagtgagccaagatcgtgccactgcactccagcctggcgacagggcgagagtctgtctcaaaaaaaaaaaaaaaaaaagaaagaaaaaaaaaaagaaactgatgtgatagtcctgttcacggagactaaaactacatgcacacaaaaccaatacgattgcaaaaatatgtacaaacaagatgtgcatcgcaagtgttgcctgtgggggtgggggtaggacacaaggattggcaataaaataaaatgtaaaatgaagtaagatggggataaggagcctcaagtgttcatctggaggagatgtggattttaggacacatagcccttcttgtctaaggttttagacctgctcaccagtggccccgggaggcaggaggttgtggagttggcttcagaagcctgcctcccacctccaagctcatattctggcaggaaccacttctaccctggatggagtgagtcggccaacaacatgagacattttgatgctttttttccctatcacagcgcatttttactcagatacatgatctccttgggacacccttttaactcg

SEQ ID NO: 95733 - DNA, 13896 bp, Homo sapiens
cttatttgacatctgtgtatcttctttggtgaggtgtcttttcagattttacccatttattaataggttgttcattttcttatggttgagttttaagagttctttgtgaattttggttaacagtcatttatcaaaataattttccaaatattttcttcctgtctgtgatgtcttcccattctcttgacagtatcttttgcagagcagaaatttttaactttgaattaagtctaacttatcaattacttctttcatggtcatgcctttggtgtcatacctaaaaagtcattgccaaactcaagattgtttagatttcccctatgctatcttctaggagttttatagttttgcatattacatttaggttagatttcctttttataaactttttgattgaagaataatatgcaaacaaaagtttaaaagtcataagtatacaagttgatgaattatcacaaagtgaacacattcataactatcacacaggttaagcaatagaaccagtacttcagaagcctctcttgtcccctttctcaatcatagctccctccctttctattcacacttttaaaaccatagggtaatgttgcctgtttttgaacgttaagtaaaatgaagtaatatagcatatactattttatgtctggcttcttttgcttaatgttacatttcagaaataatccatcttattgggtgttgcagtgtttaatacattttcattgccatgtagtcttccattatgtgattacatcacaattcaatgttaatggacatttgagatgtttccatttggagctgtcatgaataatgctgctgtaaacattcttggacatatcttttggtgctcactgggcacattcctattgggtatttacctaagatagatagtgagtgtcactatatttccagtttgtgccccactgtcccagcttatgcctagacgtccagagtaataattttcctccctttcattttcagaagtgtcccagtttggctaataaatgaattatgtcttttgatgaatagaaatgtaatgtagtccaagaaatcttttcctaccccgaagtcatgaagacagatgcctgtataatcttttagaagtcttattgttttagtttttacagtattttatgttcacctagataaaataaccttttatatttaccacttgtatgctctttattcactcctcaacagtcaggtttccttctggtatcatttcctttaatctgaaataattattgtcatatttcttataacgaagatctgtgggcaatgaactgtccttagttttactttgtccagaaatgtcttaacttgaaagctgttgttcctgttttctgtttccgtagtttctcatgaaaatttagcagtcatctgaatcattgtcccactgtgtgtattgtgtagtttttctcgggccgcttttgtctttggctttcagcagattaattacaatgtgcctaaacatagttttctttgtatttttcctgtctgtcatttgttgactccttaaatctgtaaatatatgccattcagcaaatttggaaaatttcccatctatttttttcccaaatgcttttatctcctctcacttttctccacctgggacttcaattactaatgttaggcattttgatactgcccacagatccctaggtctctgtttatttttttcaatctttttctctgttcttcagattggacaatttgtattgatgtattcatgttcagagactttttcctccctaatctctagtctgttattaatcccatacagtgaatatttatttccaatattgtattttttcagttctaaaattctcatttgttcttacgttttctatttttggctgagagttcttctttatttgttatgagttttttctttatttttctgcactgaggttaatcataatagtgatattaaagtctttgggaattccaacatctgggtcatctcagggttgccattatgtttcttaggtgatgtgatttgggattgtatcatgggcattgtgaatgatatgttgtggaggctctttattgtttcattttagcaggcgattagcttgattacactcacagtgtaaacatgatgtcacctgaggtgggtggcagctcaaatctcagttcagagatttttaaatttttagttggactccttaaaatcttccctgtgcatgaacagttccaggatcagccagagatgtgagcagagtttgtacacaaaatttaggttccctcctcattctctagtaactctggttgccccaggctccatcttctggttccttaggcaagattgatggtaggttctccatcacagttggaccgtcccatgccgtggtgtgactgtggcctgccctcatggcaaaactgaaaaactaggtaactcaccagatgctagattccttctccagatctttctccaaatctgcctgcttttgttcacgctccagagcccttaggttgtcattttttgtgtgttttgttaaagtgtgttgttgttatcagtgagagggttggtggttataggaatttactcgttcttactggaagaggaccccagttcattgacattaaatataattagtcatgtatttgcatttaatgctgctatcttactatttatattatacccacctattctattcagaatgtttttcttatcttgatttctatccatttaaatattttccatttcctccccttttagcttattagttaactccctgtttataccctttttgtaattagtagaaattacaaaattacttttaccttgttaacccaatgttaatatctctacccttctttaacacagtagaaggaatgtagaatacttaaattccagttatttccctccggattccatgctcctgttgtcgtgcattttaattctatgtatttttaaatcccagaagaaattactgtcattttctacactcaatattcatttagatttacacacaaatttaccttttctaaatgacattattttctccatctgtgagcttccatctgagatcatttgccttctttctaaagaccaccctttattattattttttttagtgcaatagttctagtaacaaattctctgtttttgtttgtctggaaattcttttattattattattattattgaagtatatttttactaagtatagagttccaggttgccacgtattttatttcagcattttgaagatatcatttcattgtgtcccacctcccattatttctgtttttccttggctatttttaaacgtttttcacctatattttgcttttaccagttcttctttaatgcacttaggtatttttttttcttcatatttttttttctctttagggcctacagtgcttcttgactttgcagcttgatttgtttcttcaatattggaatattctccaccattttctcttcaaatattgttcctgacgcgttctctctaatcctactgagagtgaaattacatgtatgtgacaccttttctctgtgtcctggatgcctctcacattcttcttatatttgccatccttttgtctccctgcaccttagtctggatctttttctttttttctgacatatattccagttccccagttctctgttcactgtgtctaatatccatataaacccatccatctggtaactgattttaacaatggtagttttatgactaaaatttccacttgatttttaaaatgttttctagttctttgtcaaaatgttgtttcttgtcttttaattctttgaacatattttcaagtctgtgtgtgtaaccctagtatctggatcttccacgtgtctgtttaatgttttttccctctcttggcttttggtcaacctttttttcccttataactgcttatttcttctgagcattggattttaaatttagagataatttgatgctctgaatgatggcatattcccgcagacagaatttagttttccttctagttggcagctgggaaggggacaggcgataataactcagtgactgagatgagtcaaagaaccatttcgtcctatgtgaaggctggcctatctccaggtcaattctgttcctagattgcagctcattggggtccccattgaaaacctaacatgtttgccaaggtcctcactctctgatgggccctgaactccagttttatccttccatttctgtgtggtggatggaagctctgctcagcttctcggcttctggaattgtcagtggccttcaggggatatggacaccaaaagccacattttccttcttgccttcctttctctcgcagatcttggtctgacaaagtctcactgcactggtatctatctgatactttcaaatagatttttaaaacttctttccaatttctctagttattcttattggagagtcggcccaagaaaagtaaggttcagagagaataaataaattgtccagggtcatacagaccctgaaagtagaatctctatgaaatctatttaaataggtggcacaagaccagagaaatctgagacttacagcagcctgcatgcccagccttcaccatcctttgtcatttgggtattaagtttgacagttgctatgtttaactctcttgttttacaaaactgatatccatagagatggtgtgatttgtccatgaccacacagcgaggtaatatgtgagttggggtaaaatctaggtctgtgctcctcggttttttcctgttaaatcttgctgcccccatctttttttttttttttttttttattgttacttaggtacccagacctacatcccagctttagtaagacatctcagtgctcagtggtccaagaagattcttctcatttgtagaaaattgtccttgatttatgcagccacaaccacatatgagtgtcacctgttaccttcttttttcccctctttcttcgcttctctttttatctctgaatttttacattgccactgacatcttgcctgtggctaatagacacgtccacactgagagacatgctctagtagagtgggttcaggactgcataattagtttgtcctcttttatgcctgggaatattatatcagattctctaaaaggttttgaaacgtaaggtgaaaagggaaatgataaaataaggcatttgagatttttaaactcatgatcagctgcttcccttgaaaataattcataatctcttccagaattgcttgtaaaggcttttaacttttgtggtttatctgctgttctcttaagcacatggtatatatttataggttcttaccttaaattttaggcagaatcatgaattagatactgggaataaagctgaccagaagtaaatcatttcccacatcttatctttgtaaggcctgaaaatgtgatattccacgctgtttttgaagagaaagcattttggtggttaccaggaggaaagaatggggcaggttggaagtgtcactggtctggcagcctggagacctcaattttatcccattgtgacctctcacttatgtgcgaccttggacacatcacatacaatttaggccttatttggcaatatgtaaaatgaaaaggttggacaagataccccttgggagccttacaattctcaaatttttggaaaactatcctttactgtgaggccagtgtctggaacagcattttgtaatatgaatgaggacttaaagcaattttttatttcctgtgatcttgtgggaagagggtgggtaaagttagataatctagaagttgacatttgtgttttcatgtaagcaagtcaaatgttctggactacattttgtttcaagctaaagagcttatgctgtgatgacccagcttattaagttagataacaaatgtaaggcacctatttcatttccttatcactgtggggctcagtaaggagtttccaaaagaatgaatgagagattatcatcataatatctatcacttatcaactgcctgctgtgccaagatacatccgtgagtaatacagatttggcatctgtcctctccaaggggtaagtattattacccctagttccacgtgtggaaaatgaattccaatctggtcttacattaaaaaccattgatgtggcgcctgcctcgcgcactgtgtgtgcacgctgcaaagaccagcaagctccttggaccttggagcaggcctgctgccttcatgtccactctcctcatcaatcagccccagtatgcatggctgaaagaggtggggctccgagaggaaaatgagggcgtgtataatggaagctggggaggccggggagaggttattatgacctgttgctctgctaacaactagccaatagcaagagtccgacaggccagtgtggcagactatgaagaaactgtaaagaaagcaacagaagcatggaaaatctgggcagatattcctgctccaaaacgaggagaaatagtaagacagattgacgatgccttgtrggagaagatccaagtactaggaagcttggtgtctttggagatggggaaaatcttagtggaaggtgtgggtgaagttcaggagtatgtggatatctgtgactatgctgttggtttatcaaggatgattggaggacctatcttgccttctgaaagacctggccatgcactgattgagcagtggaatcctgtaggcctggttggaatcatcacggcattcaatttccctgtggcagtgtatggttggaacaacgccattgtcatgatctgtggaaatgtctgcctctggaaaggagctccaaccacttccctcattagtgtggctgtcacaaagataatagccaaggttctggaggacaacaagctgcttggtgcaatttgttccttgacttgtggtggagcagataccggcacagcaatggccaaagatgaacgagtgaacctgctgtccttcaccgggagcactcaggtgggaaaacagatggccctgatggtgcaggagaggtttgggagaagtttgttggaacttggaggaaacagtaccattattgcctttgaagatgcagacctcagcttagttgttccatcagctctcttcactgctgtgggaatagctggccagargtgtaccactgcgaggcgactgtttgtacatgaaagcatccatcatgaggttgtaaacagacttaaaaaggcctacgcacagatccgagttgggaacccatgggaccctaatgttctctatgggccactccacaccaagcaggcagtgagcatgtttcttggagcagcggaagaagcaaagaaagaaggtagcacagtggtctatgggggcaaggttatggatcgccctggaaattatgtagaaccgacaattgtgacaggtcttgcccacgatgcatccattgcacacacagagacttttgctccgattctgtatgtctttaaattcaagaatgaagaagaggtctttgcatggaatactgaagtaaaacagagactttcaagtagcaactttaccaaagatctgggcagaatctttcgctggcttggacctaaaggatcagactgtggcactgtaaatgtcaacattccaacaagtggggctgagattggaggtgcctttgkaggagaaaagcacactggtggtggcagggaatctggcagtgatgcctggaaacagtacatgagaaggtctacttgtactatcaactacagtaaagactttcctctggcccaaggaatcaagtttcagtaaaggtgttttagatgaacatcccttaatttgaggtgttcggcagctgtttttgaagaagacaaagaarattaaagttttccttgaataaatgcattattatgactgtgacagtgactaatccccctatgaccccaaagccctgattaaatcaaaagactccttttttaaaaatcaaaataaaattgttacaacattaaaaaaaaaaaaaaccatttaccacttagcaacattggcagctttagttctccagcagcctacatacattttgtgctaaggagcaaagtaatcttccatttaccaagagctttttttgctttttaatgatgtattaaattaaacacccactcaccaaatatctgtgagtgttggttgcgcagatggatttgagtgtttggtgctggggtgcatcttgtcacagctgatcacttactggttctctgactgtggctgggtggagttggcatctgtctcctaggttcctcctgcccccaacagtttgtggttatggtgataaaattattgtgtgacaaatatcatggcagacatataaacagaggaaaggggacagcaattgaaagagtatcaaacacactttaaggttctaactgtttcagttaccaaggctcaggaaggcgtatgttgtgtgttaagggatccagagtcactcagacagtgttcctctccctctagcagggtatgaaactactaatggccccagaccctcatcatcactgtgaaattcactgtaaaatctttggaattttgatgagtcaaaagtggaatctggttattttgatttgcatttttggattgccagagaggctgagcattgctgcctggttttacagcccatttgtgtatttgttttgagcattgcttgtccttttcttgaccctttttaattgggatgttcgcctgttttattattgtcttagtagagattcaaaaaactctaataaggatgccaatccctttactatcatatattactaatattttttctcagttttgtatttaaatatttattatgctttttaatatgtttttcttactaaaaacctaacaatcttttcttggtttatgtctttgatgttatttttaacaaaaggcttccgggcccttgaatgctggaaatgttcacttaaattgtttttcaatattctcatgggattttttttctcatttaaaattttaatctatctggaagtaatttgggtatatgtcatgatgcatagagctgacttaatttttctccatatagttaaccagttatctcaatattattattgaattatccattactttctcactgatataaaatgacatttttattacataataaatcacatatatcgctttatatatatgtatagatatgtgtaaaattgggtcagttctagattttatctttttgttgatctctctgctggaagcatactattttgatagttgtatctttgaagtattattgtcacaactggcagagcaaaatacttgtaactcttcacagttttattagccagtggctggaatttattcctctatatggatttgagaatcatttcacaagtttaaaaagttgtgccagtgtatttatagcaattagtatataggttaatttgagagagacttagcatttttttagtactggttttccacccaggaaaacagcatctcattccatttatttcagtcatattttctgacactcagatagtctgagtgtgcgatatgatgtgttaaggcacaggttctggagtcagagagtctcagttcaaatccaagtctagccatttattagcttgtatatcagtgaaaggttttccccagtgagtgggacatagtgttgctcagtaaacatttgttgaagaaatgtttgaatgaaataatttattcctaaattttttgtttttgcagttgtgaatgagttttagtctgcatgcttgccagcaattaacattgtcagttttttagattttagcccttctactaggtgtgttttaattagtaattccctggtgacaaatgatggcaagcatcttctttggtgaggtgtctgttcagatcttttgtccatttgttaattgggtgtttgttttcttaatgttgagttttcaatgttctttgtgtatgttggatataagtccggtatcacatttatgtttgaaaatattctctcctcatatgtggtttgtgtttttattcttcccacagcttattttgaaagcagaagtttttaatgttaatataatccaatttactatttttttctttcatggatcctgctctgtagtataattttaagccccttatatcaactcataaaaacagacagggcaataatgtaaattgacagagcacacagtccataagcagcatctttcataaaactaaggattagagtatatgtctataaactaaaaaatatgagcagttagggccaaaccactgaccgtaacaaggaagtctgcaggaggaagcagctggcagacaaacagacttctggggatcccagggctggggacccagaaacttctctcaacacttgtcccaagaaggggacagtcccccaggagtggagggcttgctgttgatgtgaacacattcgcttaaagtggagggggcttcccaggctccagttggcaaacagtaaggacaaatgagaaaagtatgcccacaaagcagaagagaaactgcaacctaatatttcaaatgagctaaaagaaattaagaaaatgattaaaagttacaaaagaacaggacgaatgcaaattaaaaaaaacacaggttacatcattagacaacagaaaaatatgaaagggaattgattactcagaaaagaaatagaaataaaagcaaaaaaaaatctaggaaaggaaggtcgaactggaagaaatataagagtgaataaacagtgcagaaagcactgtatagaaattggaaaggaagaagaaaaacacagaaataaagaagacaagaaactatttgagaagtgatagaatgcaagacaggcaaaggagctccacaaatatatgatgattcattatataatatatatatgatatatataatatatattatatctatctagataggtccacatatataatacatatacatatataactcctctatataataggagcctctgaagagaaaaaaccaaaccccgttgtgtactgggaaaatcaatccaaaaggacaacatcaatgcatattctagtaacataattgcactataaaggaaaaaagtcttttggggcatctaggcaaaaagaccaagtcgtttataaggaaaagaaatcagattggcatcagaacctgagagcaatgctttaagccaggaaatactggagaagatatgttaaagataatctagaaaagaaaaagtgagccaattattctacattcagccaaactggaccctcaaatataagaaccacagacaaaactgtgcgaacatgccagacctcggggaatgaatttcccattaacccttcttgaggaaccttctgacaattactgtgactggagaaactttagcataaggactggtggttgacacgtgagactttggggtacgttagcttctggtgagacccctggctttctcagaattccataagtgttcttgatccaaagacagctgtaaaaagtggttctatgatcccttggttggaataccatttctcctctgctcaggtgttggctttgactccagtcatttggcttgtgattatttcatatccctccttttaagaagccacacaccaatgcacctgtagcttgtgtggccaattgcccacccaaaggatacatatcatcagatctctctaatatcaacaaggggaagtcatttgtttccattgagattctttctgtttaaacacaggagagctcattcaaccttatttaataaggagaaaaaaggcaattaattggctcacctaactgaaaaatccagagttagatatggctttgggcaagtcttgatctggtaatttggaagtgttacaaaggatcttgtttctttccatttctccactctgctttccatggtgttgctttcgttctcacatggtgtcaagatgttacgagaaacaacctcactacacatttctttttgataaacagtgagaatatttattaaaagtagaatagctttttcccagcattgctagcaaaatcctgggataaactgagtggactagcccaagtcaaatgactacccctaaccaattgctgtagcagtccaagtcacgtgactactcctaaccaattgctatagccaggaaaatgaaatgcttagttatggttacctgtcctcctcttcttcctcctcctcctcttcttcatcatcttcttcttttttcttctttttttcttctttctctccctccttttcctcctcatcttccttctcttcgttttcctcttcttctttctctccttctccttcttcttctttcttctttcttcttcttgtttcactctgtcacccaggctggagtgcagtggtataaacatggctcactgcagcctcaacttcctgggctcaagcaattctcccacctcagcctcctgagtagctgggactacagatatacaccaccgtgcctggctaatcttttttacttttggtagaaatagtgtctcaccatgttacctaggctggtcttgaactcttggctccccaaaagctgggattataagtgtgagccaccgctcccagcccacatgtctttagaaccaaacagagatttccaaacagaagtcagtgactcctggaaggagaaaggaaggaatggactggggaggctatctaaaaaagaatttttaaacgtgttgaattttatcaaagtgctatcttgacatttcttgagatgatcatatattgactcttattgattgtggtgagttatgtaaatagatactctaagttagggaaggcaacctacttagctgtgctctgtgggagtaactgaggttctgggagaatctgcttgtttccccttttcttctctttttccttcttccagctcttatgtgtacttctctgcctctcctcaaccctctgatactggtgttctccagagttctgtctttggtcttctgctgtgagtgatggcaaggttttaactgcctttcctgtatgctggtgtcactctccctgagcttcatacttacatatcccagagcctgactttgcattttgaaaggactagagacatctcaaactcagtacaaaggcaggggcctttgtactgtgtcatctcatggagaaggtagaaagggcaagtgagtgtgggagacagaacaaagaaagcaagcggaattcatccttttatcaagagccctctcctgtgataactaacccactctcaagataacagcattaatccattcctgagggcagagccccatgacctaatcacgtcttaaagatcccacctcttaatatagtcaaaatggcgactaaatttcaacatgaattttggaggggaaattcaaatcatagcacccctcaccactgctcctagtgtagacactcatcatcttttgtcaacaccagtagttcccaaactttagcaagcatcacattcatctggaaggccagtcattacacactgggcccacccctagagtttctgattcaatagatctcggatggggcctgaatgtttccccttctaataagttccatgtgatgctgatgctgctggttcagggaccacaccttgagaaccacggggatcattgcaggaactcctttctgatctctgttcctcccttagtctatgcacatttcaaccagagtgatccagccaactacaatccagctatgctacacctttgtccacctagcaaagcccaggcttctcaccacagcagccttctgtgacctggctccttcctccctctctagccacatggtctgttccacattgcctgggactgttcacacaaactctgttctttgccatccttgtgccattccatctgccaaaaatgctccttccatcggtcttcacttggctcattctcactgatccttcaacattgatctccagtgtggtttcctggaaatttgcctgaatccccagattgagctaagttgcccttaggtttctctggcttcatggtcatctcactcccactctgctccccactcctgtcttcagactgtgggcttttt

SEQ ID NO: 95734 - DNA, 231215 bp, Homo sapiens
  misc_feature (1)...(231215): n = A,T,C or G
aacaacaatattttttgcaagacaatggatttgttttctaaatctagattttcacacagaatgtttccttaagggcggtagaacctacagtgacttccattaaatagagaagttgtttcagagtcttccaccttcatttcttttttcttcttccagtgttatcatccctgcctaaggagacactgtctagttaccctgtctgctcactgccttctggtgccaccaagtttagttctgcctctgtgcctttgttcatgctgttcctgtgattgaaaagttcttgttgaggcccaactgagatgccgccttcttcccttcccaatgaccataactactataaaagaattgacaataccactcatctttgttctggccccttgacactcatggattgtactatattttcatgtgtaagtcctgtctgcctgattgctctgtaagttcctttggagtaggactgcaccttgtgtttcatttctatatccttttatgtctgatgcttttgtgaaatatatttgtaagactttaggaaatgaatgttccatctctcctagcctgattattggggtccaaagttctggaggtgagtagcattctggagtctctctgcagggctaatccagcccctccctgtggggtgcttgttaacaggaaggacagatcacttttgtactatgcagactcaggacccagcactcggtggcctccaagtttcatgaygttgacctaaggaagtcagatgttggctgactctcctcctacacattctctgtttgcattttctacaactggcaagagaaaaccgttctatgggccaaatcctctccttagtttcacttggcctatggcaaaaggtccaagaagtgatgcacctatagtttaaaatacaacttatttttactgtcttgaaagagctgtctccgtaaactcacttggtaggactatttcaccatgaaagtggcttcccatggctttctttgtctctctttcttttttcctctctgggtgtctggttctgtgaggtttcctttacaaatgtgtaggcattcgtttctctgtctccacctatctctgattctctcccttttaaatttattttccatcttttaccttctgtccaaaggaaaaaaaaatcaatggaaatccataaaaggaaatagagttacctaaatactttttgtggagagaattaggaaatattacacttactcatttacatggtttttatgcactgaaactgtttttcagaaaaataaatttgtcgtttcttgtctacaccactttatactcacttatgaacctcaagatatgttcatacattgtctatatttgtaatcaatctatgtacgtatctatttttaacctaacattgttttgttaggttttatattactataaatagtaatatttatatgtgatttgttgagccattccctaagtgtttgatggttgaattatctctagtttcattattgtagacaacattgctaccaacaactttgtacaaattattatattttattattctggctttttctgatgtacattaccaaaagactaccatgatgtaatcaaaggcattcactgactttaaaaactaaaaacacagagcataaaactctattaaaaacaaacaaataaaataaccccttccattttgggtaataacagttaagagaaaggcaaaagacaaagaaatgggagaaaattattcattcataaattcaacaaatatttgagcacctaccatgtcctaggcactgttccaaaagtatgggatccatcagtgaataagaagcccccaaacccctgcctttgtagagccaatattctagtgggagaaggcagacaataaacataatagtaagtgagttaattatataataagttgaaaggtgatatgtgctatgaaataagaaaaatagcaggctaaggggaatcaggagtggtagaggaacaatagagctatgtgggttgcaatttcaaacacgggttgggaataggcatcactgagtaggaaacgtttgagcagagacttgaaggaggtgaggaagttagccttgcaagtactgatgaagctgcacaacaggcagagggaacagctactggctaacaatgttggatatcctggagagacaatgaggaggctggtgcggctggagcagtgagggtgggctcagcaaggtcgccaggatccacgtcgggtagggtcttcgaggcacttataaggacttaaacttcaaggaggctgtggaaaggttatactagattcactttctttgaaaggacagatgctggacctgtccttaacccctgaagaaagtctctgggatggaaccagggaactgttgtatttcagggtggttctgttgtgcacgtggattcaggactactctttctgttcaaaagtcccacaattctaaatataaaataatttaataaaatgaagcaaaaatttcacagcattctcgaatgttggtgatttagagactctggagatcatctaggaaattgaagcccaaaggttaagtgacttgctcaaggttacacagccacaagaggcagaactcggtttcagattcactcgtctaaccctgaattcaatgtaccttccactgtactggactgcctaataaacggtatcatttcacttatcaggtggttagatttccaatagctccaccattaggaacacagtttgaatccagaagctctgtaaggttgattggttgattaaatatttggttatctaaaaatcaatcagatagctgctattgttttaacctttacagctaagaatcattcaaaatgtattaatcacattttctgcttctctagaggaattctgaagagtcatgccatcttagaattggaagggaccttatttgttcaggatcttgcagtgcctgtgggccataattttacagttagctcttatttaatactattataaaacacacaagccattcaggtgaccctggacatattggaggttttgttttacaatatgtttctgatttagtttactttcttttgatttgcttcttggatattttctgttgctaaatttttctccacttaattatttttttaataatgttggtctttctggccttattctgtaacttaggcctaatttttatcaacagtgtctgagcttgtagtctttgctgtcacctgggatgcattgaagtggtcagtggcaattggttcagaaatctcttctgtgggtcagaactcaggcttcagaactaagctgtggaaatgatttcagttaaaccatttcccctccacttgcacacttctgcaagtttcagcagccagatctgttccagcaatgggggcaggttgcacattcccactgagaacacttggtggagattataaggacacattatttttttctttcactaagccagaattggcagttgaagatgtgtttgagctactgtctgctctgggaatgggaagaaaactgtatacctagtgcatttccccttctatcttctattccaacaaagaagttgcagtcaatgaaagtcactggtcctaatatgaactgttcagttaacccactaaagcagcctagtcctattcactagctaccttgaggtcacctactctttcaaggcttaattattcttattttttaatgtagaaagttcaacctaaatttgtttctgggtgacttctagcttcatgattcagctcctaatgttctccaccagaagattggttgtaatttctgtttcatcacagtcttcttgcctttcaaagcctcagtgagtgactggtgcttttttctgggtggtttcattgcattcctagagaaaactctgaaaaagtagacatgtgtcatgagaatatgcatggctgtaaatttcagtatgtgaaggctgtcattgatagctccatgaaaggtaatgactgaaatgctatatgcattatcacaggtaagctttaggaatcattaaaccctgacttgaacgttacatcagggactagtatagagactagtgtttttgcaatttaactctgatgttgttttcccaggtcctaaattgtcctttggaagtagagcagatggttgctatgaggcttagttttaaatgaatgactgtccccatatctcagtctcagccatttaatgtggtgttcttacaggcatggatgggacaaggaaacatggatctcagcagcctggaagggaactgtgggtggaggctatgatgccaggaaaggacttactcctccagctactgggagtgctgccagcagaaagcccttggctcagctgacatctcctaggggcagtgcctcagctgaagagagccaccttgcccaaggtcgctgaggtggcctgcatgtaaagactggtccatgctggggtataaaggcccaccagaacaactcagaacccagccccaactcagaacaactctgaagcatcatcccaccttcagaatcctccctgcagggatgcctgaggcttggtcaatttctccctctgctcaagcttgcctccctccattccctccctttatttcctcccacaaatgttgactacaagagcacttcctaaaaagcctccctctgcctgctaaacaccatctcagaatctgcttctaggaggacccaacctgtgcagaaattttatgagcaatttgcctgtccattaaaaaatacagcatagactttttccaggttagctggagatggagtttttttgtatcaaaaaaagagagctaaactgagaagagaagcaaaggtagaagaataaggttagactctccctgtataactgaatttgggattgggaatgatatcttgcttctctatgaaatttagaaactgtcttttgaagtcttcatccagtcacatccaagagtggtccaggaagaaaaaggaaaataagaatgaaaaaaaaacaaaaaacaaaccttaaaattggatacttctttgtgccttgcattaagcctctatgttactgcccttgtccgtataagcaactctagataaaatcctttcttagaccatctaatttatctccccgtgccattgtgaaaatcgggcaggaattactgcgggaaccagtgactgaatgggcagtggtgtctcgcagctgtaactcagagtttacaagggaaggatgaacagcagccatccttctaaaggcattcttcctctcctccagcacagctcagtctgtgcatgcctcaccaaggagaatgagggaaggccttgttgactgcccagcccagagtgtgaggaacagcagttgacatgggcggctggacgggatagaaaccagcatgaacatttagtgacacctaaggaagaggtgaaaatgggggagaaagccaagaaccatcagacagcttctttctgttcttgccttggatcttaggggaacgtatgtgttcaagggtgccttcctccgcagggcctcccatcccttggcacaaacttccaaacgatgagtagacatggaatgggcttcttctgaagactgggtcaccatccaactcagccttcggagtaggcggtggggctgggggaagaggacggaaccatgaggtctctccatcacttcccgggtgtgttgagaggcaagcaaatgcggtgggtgggcctgggctgtagggcccctgccatttcgggaggggcctcctggtgtttagctctgggatgtgtgaaaatgtgttggtgaaaagcgagaggcttacacagcccttcaggggaagaggggctggggcgctgggggcggcgtcgggatgagtgcagaagagacgaggcctctggacagcggaggaggaggggagggcgccgaggcgcggtgccagctgccgcgcacaggggccccgcggcggagccgagccgcgggcacgctctgccctgtcgggagagctccgggagcggcgggaggggcggaggggcgcagtggggcccgggcggctgcggccgcggagccggggcacctgaggaggaaggagggtgggagcgagggagggaggggacgggcgcagaccgaaagtggggaaagaaggtgcaggcaggcgggcaggcgggcgggcgccctggcccagggccgcgggtgcgggagcccggcgaggtcgagctgggcggcggcgggggccgcgccgagggaggaggggaaggcggaggcgcggggagcgtgtttggggcgccgcggcggggagggtggcggccgctggtgcgcgcggggcgctgtgtatgcgcgctcccccgctcggggaggaagatggcccaaaagggaaagttggggtgacgcgcgcggtccccggaggctcggcggggggcaccgcggccagcccgacggagcggcggacacacaggccggggggcgcgcagtccgggcgccgccgcggccgccccctcactgcaggtggcagcgggtgcgctgggtcccggcggccgcgggcgcgggcgggcgcgcgggggagcccggccgagggatgggctgcgcccccagcatccatgtctcgcagagcggcgtgatctactgccgggactcggacgagtccagctcgccccgccagaccaccagcgtgtcgcagggcccggcggcacccctgcccggcctcttcgtccagaccgacgccgccgacgccatccccccgagccgcgcgtcgggaccccccagcgtagcccgcgtccgcagggcccgcaccgagctgggcagcggtagcagcgcgggttccgcagcccccgccgcgaccaccagcaggggccggaggcgccactgctgcagcagcgccgaggccgagactcagacctgctacaccagcgtgaaggtaaatgccccgcgctggcacacgccgtgggggccgtccgccccgtcggcggggctcgcacgggtagggggctccggcggagttgggtgaccgtgaggcggttggtttggagaggttgtcactaaggaggagtttacttttcatttgtggagatgatgggagcccaggaaatgtggtcagaaaaaggcccctggaggggtcctggaagcgtccttagctggtcctgggggactgggcggggaagggagcgcagaaggaagcaggtgggctggcctgttcctccttgagggcaggaaggctgtggcttggtttatgcaggaagaggggtggggaccattgagagcattcggtggccagtcctgttgaatgaaatctgagcactgagctggatttgcgtgccttgtaggtgactggtgcagttgcagcaccaggatagatagtgccccatattccgatttttacctgggattaccagccaggctggagtctcagcacaggaaccgagcgtagggatttgtgaatgaatgagtgttcgtgttttaagagatgtgggaacggagcagagtggaacctgttgtttgtcactgtaacgtttctctgggttggctgcatcctagacagaattgagagaaccgggccatgagttcggagtgtcagcagagccaccgtgaggggacgtggtttccagtgcagtacagctgtctgaggatgattctgcacatacaactgatcttcccagagagtgggattttgaggaagtggaaaaaattgtttagatggttaaagcagtcgctaaatatttatttcttaaagacagaagaaaaataattatttaaatagtgtcctcccgtatgttctcaaagtaccgttaaatccaagaggcttttcattgtgtaaatctgggcactgggtcttttttcctttcagcaaacaagataacaatggcatatcctattgtacagagagaaaaaaatactcctaatgtcagatagaatcacagcctttacctggtcaataggttaccaagaaccattccatggattatttgtcaaagacacatttgtatttttaatagttaaaaacttggtcttcattggatgaaggcagcccacagtggaggagtgaggagaaggataacatgttttggcttcaatctggaagtccaaaagttttttaatgaacctattttttttttaacagcatctgattgtttaacatgaagcttgactgatgtttgcttgtggttgcagtgtttctctggcagtaatcataatcaccattatagtaaaaacatcgtttattgagcacctactatgtgccaggagtaagctttctctcctaactattgaatgttaacagtgtgatcttagcatagcatgtctgaagactagagtctaggatttatgacagtacaaacctaccagttgcccattcgttacagaggcatgtgctgaacgctatactttgcttttgtcaagctctctctctctccccctccctgttcacacaaagttagctttaggagcaattttcagggatgaaaatgttaaatttggtgaaaatattaagttgggatattatcagtaaagaccatccttttgcctgacggttgaagacctgaagcagtagttcaaaattgtgacagctcatgaactttgtgatactttttttggttgctccagagaaattgtgaatttttgttttctagaatatctataatctcagtttagtacttggcaactctagctactccatgtttgttcagtagaagaaagaatactgaatgaacccattctgtacatttttaatacttccctcaagaggctgcttagagaccaaatgaagtaaaaactgaagggacaatgagccccaattattagcagcttgtataaacttgtattaatctcattgctacttggcttaagtattaaaaggcttgacctgggtaggagtttaactcattttgctttatcaagaagattcccaaataagagcttaattcactctaacccattactgggaatgttggaaatgaaacccctggttcattgacttaacactactttgcattgtgtggatctcagaaagtatatatttgaagtgaaatttgagaccagagttatttatgcaaatcttacagaattattatcacagaactgccctaatatatttaatagtatccttttaggcctgtgactcggtgttgtattgtcttttctcaatcgtaaagttcacatgttctgtgcccttttgttgctgagataattttataaaaactttacattcatttttttgtagactaagcattctttttttgccgtaagagtttgagatagttgctaggcacgtggtggtgccccacccctttccaaagcacacaggtggaaaaataaaatctttaccatttggtcctgtttacagtggtggaaggttgtaatagtttccaccccctccccccggccattttacatcaattatgaagtgtatcctcattatctacttggcctctggtattccccagagtgcaaaaatgtgtgcttgatctctctctctctcttttctagcaataattcatctcattaagcttttagaatgatgaggcattatgatgtcaaacatgatgtcaacaggaaccttcctgaatacctaatttgcaaaaaaaaaagggttataagcattaataattcatatgcagtacaatgatatcacatgggtttccatttctggtaagaagttagatttgtctcccaattgctgtgaaaatgcaacttcctagcaatttctttcctttttgcttgccttttcaaaaatagtactccaacaggagaatcctgcaggatgttcactcttgatattgtgccagttttgtaattcttgttcagaaatcctcagaggagatggttgaacctctctctgggaagaaccagggattcttacaagttttctcataccagctgttcctacttgggagcatctgggactagacagccagttgtagagaagaatcgttattgacaatatcgtcaacttgctatgacctctgtgtaggttcactcttttgtggatcagacacaggatgttgttagtttccagatggcagcatcaccagctccccgttttccctccattcatacagaatgtgctcatttgttcattcagtatttgtggccagactgtgttgtaggtgctagcgattcaggaaatatccatgaaatttggtaagcaaagcctaatgaggaggataaatctcctgtaaaatggtgtgcctaagccagttattagtgactgctatgttttctgttccatagcactccagaatttgtgaggataatcctgagttgactatatataaaaggaaaataaatagatattccactgaccttatggtaaataataatgagattttatttgggggaggagtagagctattttggaaaaaagtcatttttgttttctaagtcagtgttttggagtcaaactttacgcaagaatcacctagagagcttgttaaaatatagattgctggactccactcccagagattctgatttagtaggtcttgggtggggcctgagaatttgaatttctaacaagcttccaggagatgctagtgttgctgatctggggaccccattttgagaaccactgctttttacagtggtgaattaaattatctgtctgttgaccaggcgaatgaggtggggccacctctagcagagtgcatagtaccacactgtctttatctggggtactggtcatagcactgctttcatcttagttcacttctgtatgggaaacctgctatccctgtacaggaagtcaaaacgctgagcctccgagattggctaaaaagtctgtaagtgaggagtgttggatcatgtaaccaactctggtttcttgaggttaagttttccccaggatccttttgggtttgtacaggtcctaatgtcttgctttgccaccacaacagaagtctaaagcaaggctggatgttacatgatacaggcacatattctcttctcagctcttggaattcttgctaggcctttcaccatcatttttcattttaaaatgaagtataaagtttaataagctcaaatgagtcctgcaagctgatttcataaaatccaagtttgccttctgccattgtatatatgattacaatttagtcccttcttttcccagcacattaattagaatgaatgagcacattttccttattttcatgactttcttcagtagttccatgaatttttaaggactatcaggtaattcttccttttgaaggaaagtaagtcctcaagccaggatgtaacatagtataagctgccagctgttcagagatgatatagtttctactgaaatcctgttttggtgaccaccaggtatggcctgggcgccagcaggacagaatatgctggtgagggcagggcagattctgtggcactaaactggtcatgggtaaaggccagtaatcaaaataataatcaaaataggaaggagggagtgagccccgtggaaccaggtgggaagacagagtccagagtttgttcaaccagcaaagttggagggggccagggagcaggtgggaatgttggggccaggcaggcaagggaaatctagaaattagtggttcagcaaaggtgacagctgttgaaccaggttgagacttctgattggggaataaaagctgcttactttctattctattcaggaggctgtggtgaccaatcggagggctgtaggtaactttgtgaacccagcaccaaatgacacaagaccaaccaaccagttcttccttgcaccctgatcagacagagtctgggcaggaaacagactgcacatccaaaagggttaactcagaataatcaaatgaagggactactgcaaatgttttggcaggatgaaggaaagacaacaaatgatgctgaagcaccctaggctagaaaaagagggagctgttactaccccagaagagtcaaggggaggggatgtgtattagtctgtttcacgctgctgataaagacataccagagactggttaatttagaaagaaaaagagatttaatggactcacatttccatgtggctggggaggcctcacaatcatggccaaaggcgaaaggcatgtcttacatggtggcagacgagagaatgagaaccaagcaaaagaggttacccttataaaaccatcagatctcgtgagacttattcactatcatgagaacagtaaggggggaactgccccatgattcaattacctctcaccaggtccctcccacaacacatgggaattatggaagctacaattcaagatgagatttgggtmgggacacagccaaaccatatcagggtggttatgggaagctgagaaaccagggtagttatgggaatctgagaaaccaaacctgtaagtcagggaaaccctcagaagctgtagccttcaggagtggacagggagggagccaaagcagtaagtcccttcatgacattgtcctccctttcatcaagctcctgctggtttccacatctggaaaccagagggaaaaggaatctgttgattggggttttccagggtgctgagcagggtggagagtgggtctggaggggcaaatgaaaaatatcctgagcatatcccaaaggctcttcgtaacaggcaataagagatgttcagtgtcactggagctacctcggtatagataaactaaaattgtgatgggcagtttgatgattgtctaaaataatggcattttaaaatggccacttaattcactgtttacagttcctgtttgatgactaatgatattaaaatatgtccagttaycttggttggagacctcgaacttattgctgtaaacatatccttctcttcagttcattctgtcccctgactgctgatacactttttttatcacttcctctgtcccctgcctgctgtccttctccctatcctgaactcaaagcccaagggtggaatgggggagaaasacctgagcctcataagagactcaggaccctgtcttatcagtttattccattttttttctcagtttttactttcccactttctataaccttctctccacagactcaaaaagtgaaaaaaaaaaggattttgctatgtgcttgtaaggttatattttcaataaagaatgtgtacatttagaacatatttaaaaatattaaaatgtgtccaggaatttatttttaaagataggtgttacctttaccctacagtggaagtcttggtagttatgttttagtagaaaacaccaattttttttttttttgagatgaggtctcactctgtcaccaggctggagtgcaatggtgtgatctcagctaactgcaacctccgcctcccaggctgaagctatcctcctgcctcagcctcccgagtagctgggactgcaggtggtgccaccaccctcggctaattttttggtattttctgtagagatggggtctcgccacgttacccaggctggtctcaaactcctgagctcaagttatccacctgccttggcccccaaagtgctgggattacaggcgtgaaccaccatgcttggcccaaaacactacttttcaacaagttgtagtatatattagtttaaaattagttgttcatggctccttccctagtctctttttttcttccatcagcagataatagtcaactcttatttaggatttttctgttttactctttaccattgatttctttcatcccctcctttccccctccttagggagaatgcacagaaaagtagttcctgaagtaggattagcctaccctgctgcaaatttgctttaagaagcttgtgattgctgtaataaaaatcaaggaactattttgcttttggataatccatcaatgaaaataagaatatttcatggttgtctcttgtttccaaggcgatttaagttttagtgcatggtttgtacactttgcaacaaggtaaacaggatagctataataatattagttgttatttaagttcttgctatttgctgagcactttatttacattgtttcaccaaatctgcatgattttccctgttctgctatgagctacacgttattattttcactttagaaaagaggaaaatggggctgcaagaggtgggataaatttcccaaggcgaggactgaagtttgaaggcaagagggtccgaatggtctctcaccccatgagcccatcccttaagtgtgttgcacactcaggcctgtggccacacagcctgaagccctaagtgtggctggtcctggaactgcagttatttagagcagaaggatgataaacaggcagagggaaggggagcagggagcctcgtgagtgagatttttcctttcacatatccactgtcaccccttctattaacttgaactagagtgttttgaagttggagaagaattaaaaaatgcacacaaaatgtgacaagctctggtacaacatgttgtcattattttcactgaacacagtgcctgacactttgtaagtgctgtacaaatagtagctgctcttatttttatgrttgctattattactctttgggtaatcaaaatgagattttggttatttagatttagatatttttgaaacatgtaatttttttaatggaaaatatatccgacactttcaagtacattgatttggccaatagatgactaactggatttatagacagataggttatcccaaagccttgcaaactgctgccacagacatgggttttgtctgcttcacttggatttccagagatgacatagtagaatcttgccagtccaaggcccaagctggggtttgggttccatgactgttgagcctgcactcagcagaatttacaggtcaaggccttggtgttatcctgaggtggttccctgtggaattctttggtataaacttgtagcctgaagcctcagtctctaattgctcttagaagcattttgcatgagctcggttggttttcatattgctgcgttttgggtgctgtcagacacagtatattgttgggaaaatgatacactgtacatctaaaacctgttttctctcaaataggaagatgtaatgattagctccagggacccagttgcctgtgtgagtcataaaactgagataagaccctaaattttggaaatttttataggaagatgcatgagagattttaaagcaacctatcacccagggtaccatatgaagaaaaagatgccgttctgacgtcagaaccacaaatagcattaaagctccggaactggaaggtgatgacaagggttcaggatagccagagcttttgtccactccagggttcctgctgagggagcttcaaacgagagcaatgaccaaatggagagacaaatacatttatgaaggccagtgatgacccaacaatccacacctcagccactagtggtcctggggccttgtgggacatactcattttcagcttaaaaaatggattgacagtcttggccgagaaatggggtctctgcaaggaaacaaaagccaccaatagtgtttggagctgagccttagttggaactagaagtctctttcccccacagtcgagagtgtgatgctcaaaagaaggatggccaaataaagactgaagggagcaaggatcagcttagtctgtgcctgtgcaagcattgggtggatacaacctttcatcccagatccatctgtcatgtgcagcctcagacacacacatgcatgcacgtgcacacacctgctctrggaagtgttgctgggacagaacacctaggcgggtaagttttcaggagacttcctgctctccccctcccacatctataatgctgggtctgtgaagccagtttcaggacccctcctcacccagtagactcttgcaggtcctcctgtccttgtggttgctgccctgcccttcttctcagtcacatgtggagcccagggtgaggtctctgacacccaggctgttctctgcagtgatctggcccattaggactgtcaaaccctgggactggctgactgactgtggagccttcatcccttgggaggaacaggtgagggcaagggagtgtgatccacttagcctgatctccctacgggcagtggtagaggggagttttgcagactttgttgagattttcaagaagggacaaggaggtggggcaaaaggttggaatctcttattatatcaaaggtgagaactttgaatcctaaaacacaaccaggaaatgctttggatgaacgtgaaaggcagtgttcacttttatatgcagactatatgacaaacattagtttgtaaggcacctagttgttattggggaaagactttcatatagaaacatgttatatgtggcatttaggtttctaggttagcacaaaaaagttttagcccattatgtagctggaatatatttacactgttgaaacaatattgctgtgaaagaaacataaaattgaattagaactcccatttcttttgtatgggtgtcctttgggagaagcgggtttaattagaggctgatgaagcagatgagggagaattcgtgaagttcctttagggagtagttatctttagtgatccattgtgtgctggggagctgaggggctcaggtggtgttattaacctcacattgctagggaggaagtggaggcacaggcggctcaagtagcttgaccaaggtcacacagctagggactcagagctacatctgctcaaccgtcctgttttcactgtcctattttatctccaggtaaaaaggggtgtgtcgagcttctttgtggcacttattttctgtttcatctacagatagctcagttggtatcttttaactagaactgtttttaaaaataaatcataaaaccattatataccaaaaatatgacaacttaatatcaatcacacttttctaattgtcttactacttattcttttactgtttgttggtatccaaacagtaactccactcattgcagtaggttgctatgcctcttaagtctcttttaatctgtagcttccccttccagtctctcttttctatatacttgcagtttgtttgttgaggaacctgggttgtttgtcctgtagattttcccccaatctaaagtttacttattgcattcccatgatgcatctaacatgtttccctgccttctgtgtttgctagaaaccgtagtttgatttagaggtttgattggattatactaagttttgtagggtggaggttgtctcttttctgtgatgctaacagaaaatcggagtatgcgaagttttgtaggatgtttggttgtctcttttctgtgatgctaactcttattaacgatcattgcttatatccattagtcattagaggttgtaaaatggtgatatgctatcattttgtcttcatgtattcattggaatgcctcaagaaacttttttcaagagttgactccctagcattctcctaaggtgacaggagttctttgcctgttaatttgcttagtatcattatgaatcgttatgggtttatgtgtatttgatgtgttgatgcattgcagttattaaacctatttgtgcttagactgcccagttttgactgaagggagcttattcaagttggtgaggcacttttcttgaagaaacagttctagctaagttgagtgtgtccttattcgaaactcattgtttgtagatggggactccactgaccaccctgggggtggaggcacatcctggtgtccacctagccctctctagtcatgccaaggccccaaacatcatggagcttttgaaaggaggcatttcacaaggcccccttgcagctcctttgctataatttttgtggctgcaaaagggtaacctggtgtgaaggaaaggtgctcactgactccagcttgaattccagctctgccctgtacaaactttgtsactttggagaagctgcatgatttctccttgcacggtagggataatgcatctctaaaaggattggtacaacctagaggtacagtccctgtaaacccgctaggttctcaagtacgtgtgtgtgtattttctgccttatactaaggcgctactctaggtttggagtgataaaaaaaatgaatatgatggccgggcatggtggctcatgcctgtaawcccagcactttgggaggctgaggcgggtggatcacgaggtcaggagttcgagactatcctgaccaacatggtgaaaccccatctctcctaaaaatacaaaaattagctgggcgtggtggcttgcacctgtaatcccagttactcaggaggctgagacaggaggattacttgaatctgggaggcagcctgggtgacagagtggagactccatctcaaaaaacagaatatgacatagttccacgtttcrggagcttccattgtttgtgccctatattgtcgtcttctgtgggaaggcaatgtgttgactgagtgccggctggctggcaggagttacggattgggaattgggttcttccaggtgagacactcctactgggagagcatgaagaactgtgagcctgaggggtaagtcagctgaagactgtaaggaaaagccaaggagcagacaactgtacggccacaggcaggggccagaggcagaattaaggtcaggctttctaagcctggagctcaaagctgccagacataaataggatccaagagaactgattaagaaggactctaaagtctggtggagttgatggctgagaatactcttgggtgttatggttcagagactgccagataaggcttgctttgggttgaagctctaaagcagcattacccaatagaaataaaatgtgacccagatgtaacctgcacatataattgtaaaattttttatgaatcacatttttaaaagtcaaaataagcaggtaaattaattttagtacatgttcacttaaccagtatattaaaaatattattttgacatgtactcaatataaaatttgttaatgagatagtttacattctttctttttttattttattattattatactttaagttttagggtacatgtgcacaatgtgcaggttagttacatacgtatacatgtgccatgctggtgtgctgcacccattaactcgtcatttagcattaggtatatctcctaatgctatccctcccccctccccccacccattctttctttttttttggaactaagttcttaaagtctggaatgtattttacaattacactgcatctcagtagggactacccacatctcaagtgcataatgaccacacaagtagctaccatgttggaaaaacggaggaagaaagtgaaatttacatcaaggttctaagtcaagcatttacaatttgacattgtaacttgacaagcatagcacagtagtggtgttggttttttgtctcttagtttgtagctccatttttgcttccccattttctcctttgtattatatgaggctagaagtctgcaagctgcatcttccacattacttttccagatggtttcctcttagattccacaggtaggagatactggcaggaaattggaatgtgagagaaaggaacaggcgatagcagtggcccctgctaagtggcagtggtgctgcctgagtggtgatgatgccagccccctccgctgatcagcatgagtgtgggctggcgggtgtcagcccagggtgttaacagtttattgtctctggatgttactgctttatctttttagtttctccagctctacctccatcttccctttgttcatccataccttctaacacctttgtaaacagttcactacagcggtatctcttcttaatatatataaaatggttcttgcttttctcactggacacttgggatctgatgtcagagaactatgctgtactgtggtcttgtatgtaccatctgttggttctatggcttagcttctttaattttcaacttcttctgtctaaggatagaaaaataaggatagtgaaagttctgacctcatagagttactgcaaggatgatataatcaatatatgtaccattgctagctttgaatgtaacacccagtaaatattgcttattattgataataatatacaagccgatttttgaaggctcataatttaacattttttattatggaaaagttcaaatgtatacaaatgtagtgagaataggatagtgaaacctcacgtgtacatcccccagtttcaacagtaacaaattaagactattcttttatttatacctcctactttcccccatactttgggattcttttaaagcaaatctaaaacatcctcttatttcagctgtaactatttcagtatgtaactctgaaagagaaggactgtttagaaaacacaaccacaatactattagcaaatccctaaattaaaataatttgttaatattatcaaatacaagacagtgttgaagtttccctatctcataaacattttcatttaaakatttttttaatcatctttcaaataagatctagctattgcaatcaattgatatgtttcttaaggatcttgtcatctgtgagttccctttcctctctttctttttctcttacaatttgtttgttgaagaaactgggtcatttgtccagcagagtttcccacagtctggactttgctgattacattcctgtggtatcattaaccacattcttctggccttgtattccctgtatgttggtagttagatctagaggcttgataggattcaggtttatttactttttttttkggggaagactactttataggtagtgtcatggacctccatcaggaggcacatgatgtctggttgtgtctcttggagacgttagcagccactgatgattgttgcctagatcaattaattccttaggggttgcaaaagcctaccattctttctacagtgcttctggaatgcatctataaagataaacttccctccatccaatagttggttatcctgaggtacagttcatatgagaaaggcagggcaaatgcttgattctactcttccatttgccagttttcaaaataatgagttgatttcctagcatcctccaaaggtaaccagtgatgatttttgaattcctataaaattatcagtttataaatattagatgtgtcatagtccattgcagttattgtccttactgatgctcagttgtcctgactttgtctactcagagtagccacgttggctcctgtgtccttttcatagtctgctagtaatgtttgacagatttcctgcctttttggactgactagatgttccaggtttgttgcgtccattccctgtctctgatctagaattagtcttttctcccaggaacctaattatttttattgaaaaatggtatttagaggtatgatctcgggtgttcattgctaatggactggtcattgcttctggactttttaagtggacatagccaggaaatagatacttttgaaagataaaaatgtaccgtgagtgtatacttattcatccagtttaaatttaggactacaagccttttcttcaacctcgtcagtcttacgtttctatttcctctttcccatgacataaatcctggttcttaacatcatcatgataattcctcatttgttagatcccacatgcgcgtgcacacacacacacacacacacacacacasacacatctcagaataccagtgatcaacacgacttcatgatcaatatgaacactgaaaacagtttgatttttttccagtgatttttgatwttagggtctgtcccactaggggtgagcaggcaaattactgtgtttataattgtttaaatcagttcytttttatgtggctattctactaacaatggaccagttagtgattagcacaatacagttaggattatttatttcattttccttttgatttggtcttctttaatgtttagtttagtgttataagaatgtaaattatttatatgcatcaacgtaaaatatggtatattcagagacatttagattttatctctgtctcttacattctatgccctctgccttattggtaattacattttaaaatgttatgcatttcataccattgtttaaaatacacattaacatatgttctgcagaactcaacttttctgcattttccttttttcacttaacagatatcctggagatcattccatcgtagttcataaagatattcctcattcctactcatagctgcatagtataccatcatgtggctgtactttgttttattcagccagtcccctattgatgttttttggggggattatttccagtaatttttgctattgtaatggtgatacagggaatggccctatgcctatatattttcatatcatacagtctaattttttagtacaatagtgacataatgttttccagaaagaatatatttatctatccagagcattaacttctgcctatcatacaaagactttccttggactctttagttgtttagtaattgtaaaatagtaatatagttttagctgaagctcaagcttaagatctctagatcttaatctcagaggattttctttgagtaaaatgtacttttttctgctttcaacccagctatagtttcattttcatggaggtgtgagatctctgagacaaattgtttagaggaggtttgtcttgcatctgttggacattgtaattctcctcccttatgatggcagcaaagtgatttgagaagaatagtggctgccttttcatcttcacttctgcctttccacttacattaaagtcctatgcgtttacactggcattaacccagtcagcacccacaaaatgccacagggggctctgtatcactgattgttgtaaagaactttcttgagccttcattagagcttagagcataattgtaccttattttggtattaatcaccaagacctaaaatcaagtttttttccaccttagaaatggaatgcatagatgtatattcttttgtatgtttcagaaattggattttatctttgtgatagaatcacatatctgatccataatgatcctgtagtgctttcttatgttcaatataatttttaaactgaccttgtttttttccttatataaatgtatcaactttatcaactagcaatgctcaaggagttttcttggctcacaagttgtacatgaatgggtgagatcatacctctaaataccatttttcaataaaaataattaggttcctgggagaaaagactaattcatgaagtttgggtggggcaggagaagaaagactggcagaagcaaaggcacccatgagagagagagagcaaagatgaattagattcatagcaaaattttggaggtacagatgggaaatgaaagatggagaaaatgatataaagagtggaggtgtgcctgtgcatgtccataagagataatcttggaggtggagtatcttaactatgctgtgagccacgcagaatggaagacagagttggttacctgcctcagtttaggaaggggaagcaaggttggggtcaaatatgcagaaactttggggcagactggttcagttcaacaaacatatactgagggcttaactgggcatcaagcacctgcattagatttaagaatacaaagttgagtaggatggttgcttccctaggtgagtttatacttagttggaggagttgaaagggataacacacaagcagatatttacttctttataacacattaccatagacttaggggcttaagacacccacatttattattagttgctctgggtcaggagtacaggcacagctcatctgggtcctgtacttcagggtgtcttacaaggctgcaatcaagatgttggctagggcagggtcttatctgaaagcttgactggagaaaatcttccaagcttatctacatggttgttagtaggattcactttttagatggctgttaggctgagagctttagctccttgttgactgttggctggacaccaccctcagttccttgccacaccgtcctgccccatatagcagcatatttcatcaaagccagcaagagagacagtctcttttatcagtaagatggtagtcatattatggatgtggaagagaggattacacaagggcatgagtacgaataggtgggaatcattgggggctgtgttggaacctgcctgtcctacaagtgtctgctacagttctgtaatgcctgagagaggaagtgttccatggaagcatgaaggaagagcatggaacctacctggcagggaagtggcttctccaataatgcagtgtctggatgtctgagtgtaaccctgaaagacaaatagggattaacttggtgtgtagctgggagaggaggaagggagagattccaagcagagagactaacatgagcaaacattgagggggtaaaatacctgaggaccaccatccaagtagttttctgtgtaaaccatgtgtggaagacatatagaaggtatcagaaatggagaaaatgaaagatgagggtcagattttggagttcctcgtttgtcaggctgaagaatgaagactttatcaaggtgatcacagggaggattttaaacaggggaatgacacagtccaagttgtggtttcattagtatggaagatcaattttagcagcatttataatgatttaggtgatagatgaagagggtctggattaaagtagtgcaataggagggcatacattttaattttacaattaggaagttatttgatatttgggcaaggcagatgtgggagatagaacggtctggaatgatgtccaggttttggcagaacattcttgttaggaagcaggggaaagagaagttgacagagggaaaggaaaggatggaagggagaggtctgtaagagtttatgtaagtttgtaaattaagtggctgatgataggagagcccaactcaaaatactctttaaagagcttatgttctcaatttaatcaatgtaactgtgtaaattttctttctagttaagccatatgttcctctggtaggagagagaatcaaatacggaattcatttttcttgcaaacagttggataaaagaaaaattagtgtcaaaattttagtaaacctagaccaaaggtgggacacgcattcactagttctatccagtgcttgcaatattgtactctggcacgcagatactgctatagaataccattcacaagctataaagtgtcatgtaactgactttttcttgaaaatggagatataattagaaaaacataaaattaaccattttgaagtgcacagttctttgctttcagtatatttactatgttgtaaaaccattactgctaattctagataatttctaacacctccaaaagaaaccctgaatttattagcagtcagttccaatccccacccctccgcactcctacccctggcaaccattaatgtgttttcaggcactatagatttgcctattgtggacatttcctatagatggactcatacaatatgtagggtttgtgtctggcttctttcagttagcatgatgtttcatggttcattctcattgaagtatatatcagtactgcgttcctcttgactgtcaaataatatttcattgtatggatatactacattttgtttatccattcatctattgacggacattgggttgttttgactttttagctcttaggaataatgctgctatgaacattcttgcacaggttttggtgtggacatgtggttttatttctattgggtatatactaggagtagaactgctgcattgtatggtaactatgtgtttaactgaggaaccactaaactgttctccgaagtggccgtaccagtttctcttcccgccagcatgtatgagggtctctatttctccatgttttcaccaacacttgttattgcctgtcttttttattataaccattcttgtggttgtgaagtggtatctcacgtggtttgatttgcatttccctgatgactcattcaaggttgtttttaagaattaaataagctcccataggtgaaatctcaacatgaacttgggtttcagttctctgctagatccaggggccttcagaaaaactatattggtattccttgtcaatttaatttacactgcacctttttagctcaggaagccaaagtacaggcaccacttctcacactggctttacagggatggatgctagaatcccctgtggggccctatcccagagctctggaagcacaatctcaaggggtctgcccagcctgtgcattttaaatttattctattttattttgagatggaatctctctctcttgcctaggctagagtatagtggtatgatcttggctctctgcaaactcagcctccgaggttcaagcgattctcctgcctcagcctcccgagtatctaggattacaggcgcccaccatcaggcctcactgatttttgtattttttgtattttggccaggctggtctcgaacttctgacctcaagtgatccacccgccatctcaaagtgctgggattacaggcatgagccaccagacccggccattctgtgcatttctaaaaggctgcacattcaatgtcaatgcaaagtcaagagttgagaatcactgcctgactccagtctgggagaagaaattggtgggacctggaggaaaagcaagagacttagtctcaagaatcttcaggcagcaccattttttgccaccacaggaggtgctggtgaacacatgttgttcagacctctcaataagaactgagagagttgcttgccatttctgtaagtgcagaaactaagatttcgatttggttcagaagtttagcattaaccccaaatcattggaagcactagaattaaatgtgggccaggtttctggtttgggtgcatggagtcatgcagtgtgtgttggtacttgatatttgttttggtagtttggaagaaatggcggttaaaataatttccaaatggtgactgaaacaaaattcacatgtagttgttttggaatgcgttttttacctgcttgtatgaagccagatacagcagacagtgtggaaattggaaagacacaaagtcaggctacaaagacccagcttaaaaggaagtaggggaaagtgtgtgggaacttcccctttctacttttcagttctttttgctttttacttggattaaacagtcttgctttttagattgacttaaagttcttaaggaaaaactgtttctctttaagctgtttttctttggttacagtggaagtcattgggtttaggtttaaagggagggaatttcaaatcaccttcgtttctgtcttttgtgtgataatcagagaaagtaggaacgatgataatggtaacaatgtcaaaaggaagctgtgtgacaagaggttttgctacgtgttaattcagaattgattgcagttgtcaaagttgcatcagtcccggtcccacgggaaacagctcacccccagatggttctgatgaagagacttcagtgtaggttctgcttacagaggtgtgagcatagataaggaaagacaagggacaatgagatgcctagactagcaactgtatttagcccttaccggccctaggactgtagactgaggggcccctggcataagcggtactcatgaaggcacatgctattgccaggacagggcactgaagcagcgaaggagtgggaaagaagtgacttgacctctctcagctctcatcctgcagtgccctgccagtgcctcccactggtcacatccaacatgaagccagccacaagggaggcttgtgcaggctgcacagatcagcctttcaagacacagagcagggcagacagtggatgtggatgggcatagtggtttttacaattggagactaacttgcacagtaatcaactgttttacagtgatcacattgtatattttgttaattttagaatgtattattttggagaactttgagaaattttgcaagcatagaaaaacatccatttttcatatttaaaaaacrttcctcagtatttcacatttacttatgcaaaagcttcttgtcttttaggttgtaaactttgttatgaagtctcttaaactttgtacattctccttattttcccaatatattagtgcatatcattgtattgcgataagcctgaaacagagagggccacactgtctttcagattggcagagggtgctttaaaaattcctcttttctagataggggcatagatatttgtgaattattcaaaggtgatcacttgcctttaaatcaagttaatcaaagtggaatttagtttaatgtctttcgtagctcatagcttagggggaagatgctgtgtgtttgagacattcacatagctgcatatatcatctccttgcagacatagctgggaattattttgctgcacacattagtgaaatataccaacttgaaatgtttgtgctaaccgagtgacctgttttctgtgtcatcatgtgtgtaattctcttatgtctgagtaaaaggctgagatgaaggtctgtgtctctggatacccgtggggttgctaggaaatgattttcgaagtgctctgtggtgatgcagcaggttgaactttttttgtgaagtgttgtcatggaaaccaagtgcatcattgccttgtctgactaatttatcttttaatgataaaaatttgtaatccagggttaacaaatataaataatacaaatgcaataaaaaaccaataactgtaaagggaatactgctgtaagtagcgaatcctttgaattggaagatgtcacaggagtattgtgtgattcatgttggtaagggcttggcagtgtggggagctaatcagtttgttttccttcttgtcattggagtagggaaaccatgatttcactctgtggcttagtgctgtgggcttttattactgacctcggctcctgagcttataagtaaagaggaaggcgctgcacaccctgtgaggctcagcaagcttgccagggttttgttttctgggtggttgcttagttgtacttctcctttatgacctctcactctgctctctccacctaagagaaggctgggtgacacaatgcaagccctaccattgatgaaggccagtcatatggaaatggtgccacaggcttgctttctgggmtaagcagtcctacatcccccttccccaggagcaggtcctggagcacagaatctgccttgacttccttttcgtggttaaagggccctcaaggagagaaaacctgctcttttgtttattgaggacaaagtcttatagcattgtaagatatcaatggatgctgcttatatctggatgagtagcttactatggtaagctttccaatgaaaggataggagaactgatctgaaagaagacttgattctatatttagtagtttatctgcctccataaggatttagctactggcgtttcagtctacctgacagcccccaaccccctgaagctctgtgtgtgtgtgtgtgtgtgtgtgtgtgtgtgtgtgtgtgtgtgtgcagtagacttttgttgcattaggttaaatatgctcttcagttttagaccattccaaaatatcttttattaatatttccacctttagggtatgtttgagttttttttttttttaatttaaggggaaaaagtttgactctaggcatgagtcctaagataaataatggaagcgagtcaatttaaatcagtatttcactgactggtgtttacggcccaaatctgttttcatgctttcatttagcatatatttcctgagcacctgctttgtgctgggtacttctgatgcacctattatggataaaagaaggcgcctagaggtaactttaaggggctgagagcaaaggccagccagagcttgcaacctgtccagagcagtttcagaccaggaggattccatctggcagccatactgaaatctcactggtgatgtccctgcatttctgtgacttatttcctattcctttggtcattttcccagttccagaatcttgaccgcacctcctaatgacgatgtggtacacgtacccagcattttgcatgatttcctagtattgaccttctgtagggaatgtcacctttgttggtaaaatggcccccagaacctagacctggaaggactgggcagctcttgactccatctatggcattttatcttctgctttgatctccctactcaccctcacccaactccacatgggcttcagggtgagagaaggggccctcctcccctcgttaatatcctagccaactcatacacatgaggttgtatttagttcccagagcagaggtgagtcaagactcgcatgttcaagaggactttaccgaacctcagagatgacagaatagaacaggccgagggagcactctgaaactagaccctctggtttgcccttgggtgctgcagtacttgtctagtctaccagagactccagtctggccttccctacatagtacctttccatagaagtttgacctttatcctctctcctccagattcttccccaagattcctagacccctgacgtccagaccaggtgattctaaatccctcccagggtaaatgttatctttggaagtaagtgattgagagcttttgcttagaattccagctgccaccactctctaaatgaatattatttggcctgttttctcgttcatttaatgggataagagtaattcctattttatctgggaccagtgaggattaaatgagagcatgcacgcaaagtgctcaatgtaatgcctgacacttcgtaaatgccttgtcatcatcatattgttggaaagaccactcttccagtggtctctcacccccaacccattagggctattcttagccctcctggtctaagtacaattatcatggccgtcatctcacagagcagccccacagargcctacaatctgttgtttgtccttgcaccacagctgccctgggcccctcttgtatcacagaataatcccatagccctaccctaccttccttctggtatttacctgttggttgtgatttgtgtgtgcgtgcacgtgcttgaggaaaccccaagttgggaaacatgaaaatgggagcatagactaactaattgaccatatttattcacctttagtatattawtcaattgatgaaatactcagaatggcctttgctgtaaaacgtccagcattttgcctccatttgctgtgtatatttcagcactgggcctaccagtgtatgaacaggattctctgggacatgctcatgtttctccctgttagagtctcattcttgcagatcaaggattaggagactaaacggggcattcattcattcatttagctatacaacaagtaaatgttgagtgcctactgtgaccttgaatcagggaatacaaacaaggtccttacactcatagtgcttatgttgtaatttattcaccattttcattcattcatccattcattcattcaatgcatcttgaaattctgtgttcatctttttgtcaataaggaatattttcttcatatccttctctttttttcacttacaccttcattcgtctatttgtttggcagatattgattgaagtgggggcctaatatgtgtcagtcaatgtttgagacactgagttacagcagaaaaaaaaamaaaactaaaaattcttgttttctgagtacttacattttaactgggggagatcaccaagaaaaaaaatttaacaaccttatttggttggtactataattatccccatttaaaagatgaggaaactggagccgagatagattaggtaatttatttaaggtcacaccaccaggaagtggcaaagtcacgattgacacccaggctggctgactggactcttaactgctgtgctgtgttgccagagaggatattctggaaagataacttttgagataagacttgaaggaagcaagggagtgagccatgtggctatctggaggaggaataccccagacagtgggaggtcccgagtcaggaatatgcttggcattttgagagaagcacaagcaggccagtgtttttgggatggaataagtgagagggaagagaggtgagaggacaaggttctagctacctgtagacacaaatgtgggagtcatcagtgcatagatgacacttaaagctatgaaactggatgggatcatcaagtgagtgagtatggatagaagaagagatctaagaactagattaagacctggggcacccagaagttagaggctgggttgatgaggagaaattcagtttctaagaatgagtagccactgaataggaggaagaagtgtagtgactttcacttgaatgccaagtggaaaaagtgttttgaagaggaggaagtgattaactgtgtcacatgctgctgatagttcaaaaaagatgaggaccaatattggaccactggatttagcaacatggaggtcatcagtgaacttgaccaggacagtttcagtgtggtgatggaggcaaaatcttgcctagagtggttcaaagagagaatgggggagagtaaatttagataactattttgaggagtttttccacaaaggaarggaaaaaaatgaaatgatattggctgggaaagtgttctataatgtcaatttagttcagttggatgatggtattgtttggtttttctatattcatgcttattttctgtctaatagttctattaattactgaaagagacctccaactgtaattgtgaatttgtctatttttgcctttagttttgtcagtttttgctttatgtattttgaagctccgttgtttgctaattgtatatttagtattttcatgtatgcttggtgaattgacttttttatgattatgtaatttccctttttatccctagtaattttctttaatctaaagtttacttagacagatattccctttgtttgattagtattcacctggtttattcttttccatttgattctacctgtataattatgtttgaagtgagtttcttatagatagcatgtagttgggtcatgtgtttttaattcattctaacaatttctgtcttttaattgatttatttagaccatttacatttaatgtccatacttttattatttgctttatgtttgcttcccctgtttttcattcctctgttccatcttttctgctttttctggtttattcaaacattttttagtattcaattttaatttatctattgtgttttttactacatctctttgtgtagattttttagtggttgctctagggattatcacacacacacttaacttttcatagtgaacttagaaacgatattctatgtcttcaaattatataaagaaatcttcatgtgtgtcttttttatccaatcttcttcatagttattttatatactagttatatgtacattgaaaactccattaggccatgtcataaatttttctttcaactgtcaaacatactttaaagaattcaagagaagaataatctactatagttacccaaatatttacaatctattgcttttccttcattcgtgatsttccaagttttctcctagtatcaatttcctttaatctgaaagcttttctttagaattcttttagagcaggtctgttgacaactgatttttaagtcttttctgcatttgagaatgtctttattttaccttaattccctatgaatattttcataaaatatagaatcctgagtgaacaggttccccccaccccaggactttgaagatgatatttcactaccttctgtctcccatggtttctggtgagaaacctttagtcatttgaattatggtccccctgtaaatagtgtaccattttctttggatgctttcaagaatttttcattatctttagttttcagtagtttgattatgtttctggacatggatttcttggagtttatcgtgttttgagtttgctaagtttcttaaatatataggtttatgacttttgccacagttggaaatattccaaccattatttcttcaaatatttctttgtcttctctttctgaaattccatgacatgatkttaagaccttttgttattgttcaggttcctaagactctgtttttttagttcagtcttttctcttttgttcagattggataatttgtattgaatcatgtgcaaagttcactgattcttttcttcaatcattctaacattgagcctatccagttggttttttattttggttattctatcctttagtcatcagattttcatttgattcttttttatatcttctattctttgctgagactttaaatctttccagttggttcaagtgttaactcttgcttattggaattttttataataattgcttagtctttgtcagataattccagcatctttgtcatttttgtgttgacatctatattactgagggctcttcatagaaacagaaccaataggatacacatagatatacagaaagtggtttattacaaggaattggctcatgtagttatggaggcagagaattctcatgatctgacatctgcaacctggaggcctgagaaatctggcagtgcagttctagttcaaatctgaaggtctgagaaccagcagagtcaatgtgtaaattctagtacgagtccaaaggccagagaaccaggagcactgatggccaagggcaagagaagatgaatgtgccagctcaagaagagagaatgaatttgcccttcttctgcccttttgttcttttcaggccttcaacagattgtatgatgtccacccacttggtgaaggtgaatgtctttactcagtctactaattcaaatgctaatctttcccagaaacatccttacagatacactcagatatgttttaaaagctatctaggcatcccttagcccagtcaaattgacacataaaattaatcatcacaacatctgtcaattatcttgtcccatgcaagttgtaattttcctggttcttatgtccaggaattttagattgattataagactttgtatcttgattaaatcttatggtgaatcttgatatttccgttttagcagggaatcaaccctgttgggttcagaccacaatttctagtcagccttcttttgtggttatatcaattacatttttaaagccttttcaatgctctttgaatatgtcccatgtgtatgccacccagtggccagtctgtgacctgaaaagtgatctgtctcataatttagttctctgtaatgtgctttttagtgttagatccatatatatgcagcttggaggtgatgctagcagtacataaacaacctatggcttcgattttccaagcacttccttgtttgcaatctcttggtattttcaagttccctggggctactgatatctggccacctttcttttctctaattctttgtacaataaacaacaccaatcttttctctcctttactggataattttagtgtggaaaataacatctaacctttctgaaatcgaaatccacacttttgatgaacatgatccaattccaatctcttatgcttatgtaactttaaaactttccacacatctttctaacaaacatgggctcctctagctttagctgtattgtaagatcttagatgaggttaaacaccttcctgttcagagctttcattcttgtaataacccaggcttgtctctccagaatgctcttctacttgggtggcttttaaagcatgtttgtttatagctgctcctggtccattatcccctgggaacacaatgttttatagggggtccttgagcagaaaaacacagcagcaaccctaacccttcgacgtcagtctctccaagtgcatckaagtttaagtgttttgcttccttcatcagtactttttctgtgatccttccttttcaacaagctctccagtaacagcacaagacaaaagttaaaatgaagctttttttttttgtatttcgttttagtcattcaattgagagttttttgaaagggcaatttaaatttgttttgttttgttttgttttgagatggagtctcgctctattgcccaggctggagtgcggtggcgcgatcccggctcactgcaagctccgcctcccgggttcacgccattctcctgcctcagccttccgagtagctgggactacagacgcccgccaccgcgcccggctacttttttgtatttttagtagagacggggtttcaccgtgttagccaggatggtcttgatctcctgacctcgtgatccgcccgcctcggcctcccaaagtgctgggattacaggcgtgagccaccgcgcccggccaagggcaatttaaattttaattaaaactccgaggtcacaggaggtctcgtagacaggattctactcatgtagaaagaaagtagaaaccataagataacctagtgtacatctgccttgtcaccagtcagataatcctatgccaacatcttctccatcactagggctagctattaatatcttttcagtaaaatatgctatttaaagtgttatacccacactaattattcaaacacattcaaattgaaattaactaagctgacaattattcagtacccattttatgcaataagtgttgtgaaaggaaataaagaaagaaaaatacataactcttacctccaagaagctttctgatttgcatttccataaaataaaattattttgtctttcaaatacaggtttccaaatacagagggataaaatgttgaattaaccttttgaataatacgtagttgcaactaagcagcgttttcctaaataagcatgtttacaaaacttcctaggaagtgaccagattgctattcattttagtaacacatagtgaatttttttagtgcaaaaatgagggataaaggagaaaaagtgagacagttgcaaacaggagttgcaatcaacaagggagacagcagccaaatgaaaagagttctttttctagagcactcactagtatagcatttttggaagagtggcttttgaataaaacatccggaaaactggttgatacacttactgtcagttcagcacgcacacctcattgcttttcttcggcaagtattgggagtaactcatcattatagtcaaatatgtattcaaatgctttgactactggagatatcatagttcaaagtgtattgctcttgaatctgaagaaagaaccttaattgatgtttaatgtgaactcagatattgagagaagaatgataagacgtcacatatttcaacagatttaaagtaatttgaggaggtaaacaggcataatcattttacttatggcacaaaaacaatcatagtaagaatagttactaatatttattgagcaccacatgaagagcatgatgtgcattacctcactgaatcatgcagcaatcctgtcctataagcactatgatccttatctccattttaccaacatgaaggattagaggttagagaggttcagtagcttgaccaaggtcacactgttactaagtgatgaggccaagtctgggtgccaaggccagttcccagccaccattcctccctctctcatgagatcatgtgttcttcaagcaaagttcacgttggccatcagattatttctctgggaaaatattaaagctgcattgatttgctaaagaaaccacaagtgtctggctaacttgcatttcaaattttgctttaaagttttaaagttatcattttaagaacagctgctgtagctgctataatgcctctggaaaagatagcagaaaaaatccactgccttgcccaccactactacaaacaacagcaaaactttctcatggttcaaatccttccttaacttgtcccaacaccaaattcacgcaaggtgtatgccgatgagcctcctgtaaaatatccagagcttctaatttggggtaagatgaattaagcactccattctctctctccaacttaatgcaattataaaacctggcgagaatgcatggagcaattatttaagaaccttgaaaagtaaatagtaacaggtagattgggagggcagccagaaatggaagaactaccaaactggtggtgtgtttacaattttcccctcactggtatccctcagcctgtatccagtgctctccaagagacctccctgagtccttagttctggcagaaggcacaggaaaagaaaggtggccaaatatcagtagcaaacgtgcttaaagagaagttaacagttattagctcaacatatttcatctacatcagcatgttttaaagtatgtttcaaaggacaatagttgtgcagaatgttaggctcaaatgaacaaaaaagcaaaatagtggagatccagtgctgtttgggattaggctctttgtaaaccactaaaagaagctagatatatttctaatttggtaaaataataggtatgatttggagatccagtttattatggctaaaatttattagtgagactttaagacatcagctccttctgttagaagttttatatcaaaatgtcagtcaaatttctttttctttttttaatttatttatgtatttattttttgaggcggagtctccctctgtcgcccaggctggagtgcagtggcacagtcttggctcactgaaagctccatctcccgggttcacgccattctcctgcctcagcctgtagctgcgactacaggcacccacgacctcgcctggctaattttttgtatttttagtagagacagggtttcaccatattagccaggatggtcttgatctcctgaccttgtgatccgcctgtctcggcctccctaagagctgggattacaggtgtgagccactgcgcccggccaaatttctttttcttattagatttaacattctaagaaataccaaagataaaaagtataataccaatcaattatactttttaatatcaactataccatgtttattctattttttaaaagtggtctcttttaatcaaggctttgcaatgatgttgatgggaaaagtttatggtgaattttataaatataattcagtagcttgagcctaacttttttggagtgcaagaggagtgtctaagaagatatcttctatggtatgtccatagataaaaatgtaatacctttagacagagccaactatactaccagaaaatataatctgtatgttaagtaagccatttaggagttagcattgcatttttttgttttgaaaaaacaccccagctttattggagtatgctttatataccataaactttatcaaattaaagtgtatagtttcatgaattttaataaatctatatagttatggcaacatcactacaatctagttttagaacatttcattacccctaaaagatccctagcacctgtttacagttgagcctgctcccactcccagacccagacaaccacagatcctctttctgttggttttaacttttctggaaattttatataaatggaatcatacaatatgtagtcttttttgcctgagttctttcagttaacatgctttcaaggctcattcatgttgtagcatgtgtgagtagttggttccattttattgctaagtggtgttctactatatggataggacacattttgtttgttcattcatcagttggtggacattttggtkatttttaaatttttgctattataagtaatgctgctgtggacatttgcatacaagtttttgtgtggatgtgtgtttttgttatttctcatgaggagatacatcagagtgaagtcagggttgtatagtgactccttaagtcattgccaaaatgttttccaaagtacttgtaacatgctgcatttccaccgccaccgctgcatccttttctgcttgattaaatggttaatgtttggtctgaacttaagagcaggaagcagggtatgtgggagagttgaagaagacactccaccaccaccaccaccactgcaacaagaagggcactggggagtcagattggatgacacaagccaagccatgataggactgcaggaaacccaggctygaagatcgtagcagacatacaaacyaatcagatgggttttagaaagacttagcttgggggtggggtaaaccggtggcagcagacctctgaaatggcacagtaggactccagctgtaggctcagctctagagaggaagactgaaaacagaaagagcaacagggccctcagccacttgccttgggttcatggcagggctgcagccttggggtactcccaatgtggccaaagtcacagggtcacgtatagagatgggaccaggtcaggaaggaaagagaaatgatctgggtctaggaaaccatacaggctccaggggcagccttagggcaacttgcagtgaagatgccatagaggcaagcttcttaacagaaatacatctgttgggagtggcccagcaggcctcagtatattgtatagaaagcagagactttgaaataataataataataaccaacctgtatatagttctcactttatactaagtacttttttaagtgctctctctctctctatatataaatttttwaaattctcactgcaaccccacaggatagatactgttatctcatttgattaagcaagacactaagcatcaagagatggagtgacctgcccaaggtcacgcagctattaagtaggtaaactaggattccaaccaagactggctggctccaggggccatcctcttgaccactaagctagtcacccctcaatgtaatgcttatcacctctgcctgaatggactcaaaaacttgtcatccagggcagggggtgctgagaatctcagcataggagaggcaagaccctagctgaaagtttaatacaaaaatatcacgcagacataggccacagattccagtgaatgtgtaatcataggcaaggggaaaatactgtatcttaagggaaaccttaagtgaaatattccttacattgtttttttaaaaacagccaaaaatctccctctagctctgcagttaatatttgagctatgtctaagataggtccaaaagtaatgaactagaacattgtcatacaggctttgcatgattttagctactctccattggtttgaataaaatactctcctactctccaaattagcgaaatgttatacaagctaacaatggtttaaaaaatgaagagtgtcttgagtaaaataaaataactttgttttttagggggagcattaaaataaaaagaagagtacattgaaaccaaattatcaatgctttgtaacttttctgtgactttatatgcaagataattagattttttaaaagagacatatgggtagtatcattatcattaacaatgactattttctgagaattgacagtctctctgatcgtacagaagacaaggcccagaccttcaggaacttagagttcagagaatgaagtgagatgattattattgggcctcctctgcctgcctcatttcctctttctctttggtctttatttcatggagcagcttgtgtgtgtgtgcacatgtgtgcatgttcactaagggctatgcacttatttgaccctcacagcagccccgtgagatagatatattattatcctcattttaaagaaaaggaaactgaggtttagtatttacatatgataacttatctgagatcattctgatcagaatctgtgttcttactactatgtattttgtacccctcctctctcctataacctcctcccccccccgccccccccccccaactttttgagatagggtcttgttctgttgcccaggctggagtgcagtagcacagtcacagctcactgtagccttacctcctgagctcaagcaatcctcttgcctcagccttccaagcagctgggaccacaggtacgcactaccacgcccagctaactttttacattttttgtagagatgggttcttattatgttgcccaggctggtcttgaattcctgagctcaagcagtcctcctgcctcagcctccagaagtgctgggactacaggcatgagccatcatgccctgccctattgtcttttatttttcctcctcaattggtcataatattaaaaaaaaatgcattttaggtcatttgatggatttattgcattcatgctattatttgacttcattgatctacaaatgattgtgccattctggcttgtgggcgtggggggttccctcagagggcaggtcccaggacagttaggttgttcgtggggactcctccgccatctgaggtcaggaagagaaaacaagggcagagcctgacttatgtacaatttattgcagggttctgaaactcccgcctgaggtaccggtctggctcactacctatttttgtatggctcatgacttaagaaagggatttacatttttaaatgcctgaaagaaagttagaagaaaaaaacattttatgacaggtgaaaattatctgaaattccaatttcggtgaacttaaataatgttttattgaagcatagctgtgttcatttatttacttattgtctatgatagcagtcacacttgcagagtcgaatagttgtgacagagaccaaatggcctgcaaacccaaaaatatttactgtctggggccctttacagaaaaagtttgccaatccctggtctactggagcaggttggagaagctgtgagctcgttgaggaaagtgactaagctttacaaaggaaaagagccagcaggcaacatggtgttcttgttgggtaagagttcttcagactctggctttgatcttgactccacctgtgtgaccttaactccacctgtgtgaccttgagcaagttactttgcctgtctatgctcatatttcatatttataaagtagtgataatcgtagttcctacctcataggttgttataaggattatatttatatgctaatcttgtcaacagtgctttaatataaatgtagcacacaaataagttaattaaggttcattgttgtgctatgggcgtttcctctaggcttcatacaacagggccctactggcccctaaacctcagccactctggatggcaccccacccttagaaatatgagaccttctggttggctcctgagatccttctgtctccagcacaggctctggtggctcacaggtgtacttttctccttattgttctgggccagtagctcccaatgccagccctttcagaggctcctgccctctgttccgcagcaggaggtgtgatgcggtcctggcactgcagtcacgcagggtgcctcggggtcccaaatgwgggccatgtcattctcacacgagcctccctctgtgtcatatcacaatgagtgcatccctgatggccctgtggggccacaaccatgaacattagtccagagcaggggtcgagccatgccctgcggtgaccctgtgtgacctgctgagggcctggctgctctgcatgttcatcaatatcacttttatgcagcaggtaccacatgccaggcctcgggctrgggctctgcacacatcacccttcatcctcatgagatccctgcagagcagcacaatacccatcttacagtggggaggtcaccacagcagtcagcaaagtctccctcctgtatctagggctaaatgtgttccttccccctccctgagggccagtgttctgtagagatttggtttccctcaagagaggtggaaatcatgtcctagtatgataactatgaatcctttctgcctcttacccttggctgcctcatcccctcacccttaggccacattggtttctcctaagcaccatgtgtagtaggtattcagtaaatgtttgctgtccaggggatccatgcaggaargtctgaggttacaagcaggtaaacagaaaagcccacmgcacttcacccgcatggtggtgtttggatctattataacagcacgtctaagccaggcctgttcatcccccatgggacagctgagaaaacaaaggtaggtgcagagaagtgaagtgattattccaaagttacagtcacaaacccagctctgactctgaaacagaaaagtgttctaggcagaaatgacaactgagggctaatgagcattaactggactgcaagctcgatgagggcaggggctattgcmtgtttattcactgttggaacccaagggccaagaatgctggctggctcatgggaagtacccaactaatatgggtggaagtcatagcaaatattgttgccaaggtgcrgatgaatcaggagcttcctatttggatgggaagcaaaggagagagtataactgcactgagagggataccttctatcctcaagaattaagaaacccccaattaaattagtttttgttgttgttgttgttgtctaatgagcttcagtttcttctgtatccacaacacggatcattggccttggtgacaaaaacttccttgccccagtataccttatcactacagggaaaaagtccgtgtgtacctaccgtgaagaarcaaggttgttacctgacacactaacaacacatcagatgcacttgcagaatccggcttgtctctggggaaagaaacaatctacttatgccagaaaacctctggaaatttacacatcgtatgtggtgctatggactgaattgtgtccctccaaattcatgtgttgaagccctaactctccatgtgactgtattttggagattgggtctttaaggtggtgattaaggctagatgaggtcacaaggctggggacctgatccaacaggattagtatccctataagaagagacaccagaaagctactccccactccctgccatgtgaggacasagcaagaagacagccatctgtaagccagcaagagagccctcaccaggaaccaaccctgccagaccttgaccttggacttgctagcctttggaactttgagaagataaatttctgttgtttaaggcacccagtctatggtattttgttatggccactcaagtgtactaatacatgtagtttcccaggattaatccatttatatraccaatatctggctggaragacctttaartcttcaacaacagaagcagaattcttcaaatgatgccactagtagttaatgaattctatccaaataagtagcaggtataatgatccatatttttacaatacgaaaagcagcatttaactattttctgtttacaaaagtcacaccacaaacactgtccactttaattctcagagtagtgctatgatattgtgagaggcaagaaaattcaagctcaagagaggttgaatgagttatctaaagccacatagcttctaagtggcaaagctgaattctagcctcagtgtttgacttttggacaagactgtgtagactcagggaaatagtttagattctctgacctttcatggctgtatctaccaagtggcaaaaaagagctcaaaataaggcactgtaacccaaggagaaatcaggaaaatttagaacgaaggttttgtctttgtccttaatttacctgacagcattttctgaagtaatggatgtctcaaaaatgtgtgggatgcaatatgccacatttgcagcaattgctaggcagaataaggagaattggggaaggtgttagcggcatcctgccttatcagctgtcaaggccatttgctcttgtttacctgaagcatgccacttaagaagcacttcattttccactgataaaaattagaggatttaaattttgggggcaaggattccagaatgaaaaaaaccatttggctgaagtgtgtgcatttgatctcttggaaaaaacagagatttgtgaaaacaaaaaccattacaagtcgatgcaagcctcgtacaagaagatgtatgcagaggtttcttcagttggtcaggcttatgcacacgtccctgttatacaatcactgaattactgctttgcttaattgcttccattttaaagagaaaaacaacgtaataagactaagatctaaaaggaaaaacatgcaatgcttctttctcatcaaactgggagaggaataagaaattaacatttattgcatgcttactccatgtcaggctctgtgccaggctcttgggatgggtatgttgcattttcatcttcacagcaactctgtgaggtagagagtatcatttacatttttacgaattaagaaatagagttgttaacttcttcaagctttttctctttggaacttggggattgaaacaagatcagatgactcagaaatccttgccgtcgctgctaatggaatccagttactcccttcccattctccctctatgatgattccaggaagggatgaggccctcttgaccctggggtatatgaggacaagggacctgggacagggacacttttcgtaagtgccacacttcaaggtaaaaatgcccatctttgctacttaaagagcaagttcctcttgaggttctggggtgccttcccttcttcctcattaacttatttctcccacagtgaaagcagagaaggtctcttttccatgtgacgatgacttttgtatttttgcctgcccagtgatagttccctttgcagggtccacaatcagggtgaggtgtggggaggtctcagtctctctatagctttggatgatctgaaattgtctgggagtcactttccagcctgggtcattggtggcctcaggattcactgacaagtccagaagaacaagacatgtttcctgggccgccaaggtccctcttctcagatgtgaggaggggatgcaaaaggctactccaggagacatagcatgattctgcaagtgcattttggctgaacatcatgagatgtatttttctttgtagatcaggttataaaagcacatagtatagatactggactaaataaccatctgtagtagtgtaattcagccacattataggttcttaaagacagtttcgatagctagggaggctgtttaacaatagtagctaggagcatagactttgaagtcagactgtctggctttgtatctcaaccctaccacttagctgtgtaaccttgggcaagtgttcttggacctttatgtgcttcagtctctatctgtaaaatgaaaatggtaatactgaccttacagcgttgtcaggagtattgctgctaagaagtggcaattctgaggatgatccatttgaaggtcatctgtatttttttctctggctgtttttaggattttctttgtctttggttccctgcagtttcactgtgatgtgtgtaggtgtgactttcttcttatataagtgccacactcctaagtaaaaatgcccatctttgcygcttaaagagcaagtcctcttgaagttctggggcatgccccccttctttattaatttatttctgcttgagttaaagcagagaaggtctctttcccatgtgagaaagacttttgcattttgcctgcccaattgcttgggaattgttggttctcctgagtccatggattgatgtctctgattggctgtaaattattttcagttatgacttcttcccatgatgcttcttccccattttctcccccttctccctcttgaactccaagtaaataaatgttagactctcccactgtatccaccgcatcrctctctctcttcctttttttgtgtctgtgtcgtattccagatagttttctgatattttgtggtttaattctctgttcagttgtatcttagcagctgttaaattcttccactgatttattaattttgattattacttttttcagttctagaattttaatttgtttctttttcaaatctgccaaatcctcttctcatagtttccaatttctttctaaaatttaagcctttgtttttaatgcctttgagtgctatacatatggttgtattacagtctgtagctggtaatttcagtattcgaaggcagcctctatttctgttgtttctactggctctcgcctgtgtggttacatgtgctcatgaatctggttatccttcacagctttggcttctgctgagtgtggggtgttgtctggtgactgacttattctgagtgcaaggcttgaggtgtcctagatgactcgttgctgcaaggcaggctgacagtccaccccagagctggttcacttgggattcaccctttcccagagttgtagcctttggggcacagatgaatctgggtggttcactacattctccacttttggtgtccctggcttttcctttagcctccttttacccttgaatctgttaaaataagaagctcagttttacaactttttctaccaaattagcaaatactcatgggtactcaatttacccaagtaggttctcagtttctagaatttggtcttccagtgcttactacattgataactctttgaggccttttaagaggatgttttaaactattcagtgttttgagttgtccttattgggcacgttggtcctaatttcttagtgtgccattactagaagtggaagttccccattctgactttgatacaagaagattggttgccctattatgtctgttgctgtttgtttgaggaagatacttttgtgacacctttttctgcccrtttccctttttgatactcctttttcctatataagaactatatttatttgatttggaaaggggtaaatataatcatcttatcattcctcctggcagaggtagccgttgaggagtaaggcttttttgatgagtagaacactggtgatttgacagaaaagaataatacttctggccaatattttccattaatttttctgttaccatcttaaaagcatcagagtttaaggagataattttctatttcgacccttccattgaggtcactttttttacgaagtctaatctctgcaattatgacatcacattttattgtagagcaaagcatygtactttcagagggcaaatatcatttaagtgatagaactgatttttcccccaaaataaacacagctcaagaaaaagcagcaagaaaattaattggtatactaggagcaggaactgatctcctggtttgctaggtaaacatctgtttttagggtaatatcaggtgttcctctgagggaaatttgtactttaatacatgaatatattggttcaaagtaattatgaagaaaacagtgttccatgtgtgttgcgatcttattgtaaatgagtataaattttaaagggtaaaggatcgtagtaatcaagtcacacttgaaaattcttcacctggagacacctaatgattaatgtaaatgaggttggagaggaaagactatgagaggtgctatttgctgctgttgtattttccttagcagttttcccctttcacatctttggattccaaattcctgtctccaaagcatcaagctttctaatgattggcaaaaaccactcaaaatattaacatttgtattctgcttcttagaagaaacctttgaaatatgagagaaaaagaaattgaagatgactgcgcctatagatttattttattcatttgaaattttaccagcataaagtcaacttatagtgaacataattctctttcaaaaagtcttcatttgacgttaccctccaaagattgcttagattaatgggacgaaagttttgggtaaaagcttgggatacctgaaatttgcagctgtatacccctggctcttgaygtgagacttgacattgaaccttacaaagagggcaaccttaggtgatatcattggtcacaaatgcattacagaaaatgttttctcttagttaaattgatatatctagctcctaagttgattgattcaatayaattgaagactgaactataatggattttgagtattctatattttatttagtatttatatatataaatatgtaactatattttattgagtatttatagttattactgatatgaagtatgctttcacattcttttcattaatatggcctaaaagattactaaaaagtaatgcattgggactttgtgtggaactaataagtagataatctctatgattgtatccttgcttgaaaaattttacgatgttctgttcagatctatttgttatccattgtggatcacagatacaaaaagaatctggttgctaagcaactagattatatatgatggaactccttgaaagaacttaagtgttaactctttagaaattgagaggtgtctgagacatcgtgaatcccttacttttaaaagtagatatgcattatgctcggaaaagaactacagtgaaaaactgcctcaaaagtagacaaaaatgatctcagaactatttgaataactgctttccaatttagaaaattcagtcattaaaaaaaaattgaaataattgcactgaaaatgataggttagtgctttcttttaagattcccatctctaatgggtttattagccacctcttttctctagtcattgtgtcgttaccaarctcccaaaaccaagtatgtaatgacgcacttagtttccttctgcctttctcacaaaggggctgatctttcaggctttgtttgttttgtctttttttttcatttttttcctatcaagtttcgattttgtgaaatacagttgaacaatggttggaacattaacttgaaatgaaaagaatcataattggagttaattttttaaatcagtttatcagttctccaacaataactgatttcttttgtgcctgctgttttctgttcttcttgaaatgtcttatgttttcctggatggaccagtaatagcagatgcttctgtataggtagaggtgagagctcactatatttcttcatttgtgtatgctctctgtagccttaggggagtacggttgttttaaataaatggaaccttttggggagacagggagggtggatgtgtcttctgattttatgagtctcttttgtttctagagaatctttcrtttctgttgcttgctttttcttttcctcctttcaccatcaagcatccaggggaggtgaccctccaagttacctccctccctccgaagtggtgccctcccaagactttggtcctggcaacttttcagccccttctttcatttcctctgtagccaaggatcagacttgttctcagtatttccacacttagggtggtacactctttytgggggtgattttcatctgttccccaaccaggctctgctgcctgactctcttttctggaaaggtttctgctgctttcagacgttcatttttctccctatgcattaattgaagtttagagtatrtttcgtgtcctggctatgctacaggcagggctggcttcataggcatgccaccaacgcggctgcacagggccctattctcagaagggcctctcacctggggtttaatgcttggcagtcactgtcttaaaatccttaataatttagtatttgaatttgtgttttgtaagtgaagtctgatgggacaatggagcatgtgccaggaccttgaagccttggctcacacatgagcctgcctccccttccccagcaacacttactcctcacctccccagccccgaactcccctggctgaattctcagccacctgcctccgtgtctgccttgcagccactgaggtcctctggctgaggcagcaacctggctgcattgcaggcggaggtcagtgctctgtcctagccttccacacccaccagggacctggaggcatgtgtgggaaggttgaggttcctggttgacagtgtcatggtacattcagccagcaactcagtggggcctctcgtctactacagatccaggtacggggtgtgtcctggcacagaggtttcgattccttggaagctgccagttcactgtggtttgggtggactctgggaaggggaaattgatttctctgccctgggctggagccctcattttcatcttggagtaagccctgccaactgtgtagtgtgccctggctgtagaagtgagttttgggtggttttatttgctctcgtggttgatttatatggttttggagagattcgaatttaggcagttgtcattatctcatgggaaactggaagttccttatttcttttaatttgcttttatcaaacttttttccaaactgtaaaagcaatttgtatttttttgcaacaaaacaaacaatatgcgggtatacaaagaaaaagtcaacattctatttccactccctctcaaagtgaccagtgtttacattgggtacgtatatgaggtcttcccacacttttattcacaatcatatcatacacacacgcatgctcacacacatttatatgtgcaaatctacatatacacaagccatgtgggggatttgagggtgtggtaaaaatgcttatatcttgataacctgaaagtccctctacttcagtgcatctgaatccarctcattctttttaagaaaacataatattctatatccatagatttgccattattcagtcacgcatcttgtaatgawgaacatttaggttgtttccagttttttagtgctatgatcatgccactgtgctacagcctaggtgacagagggagaccttggctctaaaaaaatgaggaagagaaactaaataaataacttctatggtgtgtcctgggctctgtacagatttattctattctgtaccttatttctgtattcagacatcaacatcactggtgtttagaatgataataatgaggtactgcaaagttatttataatatactaaacttgtaaggcatgaagagccaactattacattttaggaaaaaatctcaaaccaaaaaagagttgaagcatatagattttctgaataatcttcatttgactaaaaatttactttaccagaatgctttttcttgattattttgtttaactggtattttgcttagctctgttattcaatttatttaagaataatttattaaatccctactaggttccaggcatttttccaggtgctagggtaatagcagtgaattgaatggtagtgawcgtacatagaatatgatgtcaatcacaaraaagtagatatatctaataaactaacatagaagataagatatattagacatttcagaaatacttagtacatccaaaagaaaacagaaaaaggggaatggggggaactaagaacagagaagagaagtacaaaacaaaaagcaagatgatagatttaaacccaaccacatcaatagttgtattaaatgtaagtagtcyaagtatctgaattaaaaggcagagattatcagatrggataaaagaaaagtcaagagccaactatatgctgtcaacaagacatccacttttaatataaagacacagaaagcttaaaagtatagaaaaggatgcaccagcctagtactaaccaaaagaaaacagaagtggctattttcattaatattaaacaaaatgaattttagaactaagaatattaccagtgataagtattatcattttataatttaaaaagaggccagtgagtcaagaggacataataatactaaaatattatgcatctaataatagggcttcaaaatatgtaaacactgatagaactggaaggagaaataaataaataaaccaacatttatagccagagttctcaacacccttttcttttttaaaaaatttaatttaatttaattttaagttctgggatacgtgtgcaggatatgcaggtttgttacatatgtaaacatgtgccatggtggtttgctgcacctatcaacccatcccctagttattaagcccggcatgcattagctatttatcctgatgctctccctcccccatccccaaccctgacaggccccagtgtgtattgttcccctccctgtgtccatgtgctctcactgttcggctacatgcaacactcttttcttaatagcaatttggggaaaaatattcagggcaaaagaaaagtgcaaggatcctgaggtcagaaagagcttgagtgtttagaggaacccagagcagccgggtgcagtggctcacacctgtaatcccagcactttgggaggctgaggccggcagatcacctgaggtcaggagttcaagaccagcctggccaacatggtgacaccccgtctccactaaaagtacaaaaattagctgggcatggtggcaggtacctgtaatcccagctactcaggaggctgaggcaggagaattgcttgaactggggaggcggaggttgtagtgagccgagattgcatcactgcacatcagcctgggtgacaaaagcgagactccatctcaaaaaaaaaaaaaaaaaaaaaggaacccagagcagaccagtgtgtttagagcagagtgaactgatggagcatggtccattgtagaccagggagataggcaggggcaggggctagattgcataagaccttgtgaaccattgtaaggagtttgcaaaagcactaaacatgtttgcttcatactgtggctttgatttaatatttaatcattagctgtatcttagaatttctccacagcctaaaactgaaaacagtaggtgacaaagaaccccacactttaaaaaacaggctggacctgataggataccatcaggaaacagatatgtattcctcccatcccttctttcaaacctgttctgtcagatctgcatctctgaattgtatctcagggatctatcacagcttttgagtcttattttcagttattaaaaagttcagtctgatcttaatcaaaactcccatctcccattattcagttcagtgctcttacgcttccttcagctcagcactgcccttgtcttggaaattgcaacagggaagagctagctgtgtggtctttgtctcagctccctggcttttcctcctcctgtacagactgttggttcctcagggtctgggcaggggcagtgagaggcaaaaagggagaaattggttttctgagggtcttctaactctctctctttaggtactgaataacttctctcatggaatactttggtggttatttttctgttccctgcctccaacacacacacacacacagacacacacacacacacacacccccgccccycccccccccacacacacgaatgtttctgccycttgacaggggactgtgctctccagctgacctgtttgcataccctcctctcctggttcctgctttttgggtacagctccagcctcttcctgctaaaatcccctcactccggtggcagtcagccctcctgggtagggtcccttccaggtagttcaagtctgctcctgtcttctaaagacattgtccacttggcccatagaacaggttacaaacctttgccccacaagagattggaatgtaagcttctctcgctatcttcttgccctctcccttcaagggcagctccaggcagctcccatctctgtggtacmtgccccaactctcctaaaaacccttctgcaccttctctggtggcaacttgtggaggcctaggagtttctttccacaacccagcaagagttctgcctgggaggccagcctctcctccagcaagcacattgctcccttgggtaagttcccttgctactgccctcacttggaaggggaatttcctccccacttctctactctaagaaggagggggaactctgcagcaatccctactaagccaacaactctttcaaaagtccccttcacccagcaagtccccagctttctcttaaagacactgaagatgggaggtgagctcagggtggtgggggtatgtttcccacatcctggcaagttctttctagatgagtctctatagtgtgggatctttatttcagctttcagccatttaatatcctgtttcctgtggaaaaaagtttgactatagaaataaagctatcagccgggcgtgttggctcacctctgtaatcccagcagtttgggaggccgaggtgggtggatcatctgargtcaggagatcgagaccagcctggccaacatggtgaaaccccatctctactaaaaatacaaaaagattaggtggccatggtggcccatgcctataatcccagctacttgggaggctgaggcaggagaatcgcttgaactcgggagttgcagtgagcaaacatcacgccattgtgctccagcctgggcaacaagagcaaaactccatcacaaaaaaaaaaaaaaaagaaaaaaaagaaaaaaaaaagaaagaaagctatcacacttaattgtactgatgaaataaaaaacaccagctaatttggtcattcaggattcttttgaaaagctctcatatggcagtagaaatttaagactgcaccattaaacatatttttcagaaatcagttcatcagtttaccatttggttgggaaaggaggaggccttttcctgtaaggagcattttaaaagtgacatttaaaaattagctaccacgtatgcaaatacttctgaaaacttttatgtcaaatttaatgatttgatcaattaggaaatagcaaatatayccatagacatcagttgcatagacttgaatttcacaattaaaaagtgagtatatccttgggtattttactgataattttcactgtggctcattttttttttttttttttttttggagacagagtctcactctgttgcccaggctggagtgcaatggtgcaatctcagctcattgcaacctctgcctcccgggttcagtcaattctcacgcctcagccacctgagtagctgggattgcaggcatgtaccaccacacccagctaatttttgtatttttattaatagtagagatggagtttcaccatgttggccaggctggtcttgaactcctagcctcaagtgatccacctgtctcagccacycaaagtgctaggattaccacacctggccactgtggctcacttcttaattgttgggccattttccccaagtaccctgtttctttatcagaaaagtgatgaaaatatagaattatgatgactgttctaataccggctgaagatggaagaacaaattgggaacgattgatcaagaccacacttcagatctgtgagactgtgcataaagtctgcctgaaagctggttgcattctgttgcttttaaatgtctggaaataaaaatggtctggtatctttaaaaagtttagaaaaagtccagtggcttagaaaaatgccagaagccattctgtcagaattctctagaggaggtagtaaaaccagcctgcagttttttattaaaggaactcaccatawgatatatacagatgtgatggtgaggaatgtcacctccacagagacaggagaagacagtcacaaggagcagctctaatcccttaggatctgcatgaagcccagggtttttgagaggtggaagttaaagggttaagtatttctgtttaatgtagaccaaggttaaccaagatgaaattaaacattgcttgacagcagttgaagattggcaagactatggcaactacacttctctacattttactctcaattatgccattttgtttctaattaatcactagcattttaacaaaatgatgtaattgatagctagcaaccagactgtcagtcttctccccacatcagaaggtatctatccatctattcagctattgccagacacaccttgtgcctcatggcagctacctagattgccggccagagggcctgctctccacactagacctgtgaagtactagaaggttcctaagaggattccagtaatgacccttctaaggctgtcagtggaaggaggattgtcctgatgtgcttctaaatcccaatggttgccgggccttactcctgacttttagaaggctaccccagctgtgcctgcagcagcaaagggattttccatgtgtggattcagagaagtgccttgcgttcacagggaaactgtttttattcttgtgtaacatttgaggccatccctctgtaggttgctgacagcctcctgttttccatttttcctctctgcagctttctccagggtaaaataaattgggcttcaatttttgtacataatttttttaatgaggatactaagacttaaaaatagtagcaggaaacataagcctttattcactttacaaagcataaatagtaacagtatacttcatatgtacagtgtgaccagttaaaatggaaagatcctgcrtatgggaacaggggtggcactagtgagtgtgcctggtaaaaaaaaaacagggcaaaaaggcagaaaatggagagaagcaggggacagactgaatgattagctcacagagaaaaaggaagagagaagagcctctttatgcttcttctgacatgtcctctagtactaaagtggtcatgggttagctttatccacagtctccctgtgtggctatcaagcataatcagtattgtttttcaagaatagaaccaagaaaggaaaacaaatgtccctctcgctttgtacccctactgaaatattgaagaactaatttgctggagacaaaatgctggtgtagaaagtgacaggcctgattacatactgctgtcacaaaaattgatttccatactttatagttgtaccttattatcaggtgcatatattgcatgtctgcatttaacatttgtgcacaaaataaacttctttgattgcatttgacttggcaccttgattatctttcttgttgcataccggaattggttgtgcctctgattttctacttctgtctttagtgcacttgtaatatgccagtgtctggaaaccattatgacaggtcctaccaaggatgccagctggacttgaaggagacacttgttttctctcctaaagtctattctgtgaaccacatgacctgaagatctgctttgtttaggactgggagcctgctctttccacttaagcactctcaactggtttcacaaggctgagtacgcatcagattttcacttcacttgacctgtgacataatatcctcaactgaggactccttccttttttctgatgtaatagtaatttttaaaatgctttcctggaaactgattgaaatgggcattgttgccacttcatagaaatacactgaatgttgactctaaggcttacatatgctttggagacagtgttataaggtttcaccaaaatagaaggaagatggaaaaagaaaaatgatcagtggatcatacagaggccaccaaggagagtatttgagagatcagggcaactagaataacagagatgacagtttagggcagaatacatttttgtaagagaataggaaatgttttgtctttaatgaattaagatcaatgcgaacttttattccaatgctgatcttgcagcaggttaaataacatatcctgatgttgcagggcactttctcagaatgcagttaagtaaataaagccttgtttcttggatcatatcgaagtaaataaatgtttttattctttagtactaagagctttatgttgaataccatgtttctgatatgccgttatagaatctgataagtactttttcacagagaatgaagttgatttttctctactgaaaaatgaaattacaggaacccatcctcctgtttccttcccctacccatcaaaataggaggatttgaaaacatggtaattatctcatgtgatttggtttattaaggttaaagacgtcttatcaggttattgctaaaggtttccaagaccccttgcccaactgatgtcggaggacctggtatttggtgctatgtggagtaactatacagctaatttcctaatggaggttattgttattaattcaatttatttttatagcaastttattgagaaataatttaccaccatacagttcacccctttaaagcatacaacttttagtatactcttagaagttgtgcaaccatcaccataatcaattttagaacattcttaccattcccaagagaaagcctctacattagcagtcactacccattttctctcattagcagccccagccccagaaaaacacaaacctactttctatctctataatttgcctattctggacatttcatatgaaatgaactcatgcagtacgtgcgtcttttgtgtctggcttctttcatttagcgtagtgttttaaaggttcatccatgttgtagcaggtatcagtaattcatccttcttatttctgaattattttccatttaatggacatacctcattttatttatccacatttgggatattttcaagtttcaactattatgaataatgttaatatgaacaatcatgtacaacttatgtggacagatgttttcatttctttcaggtatgtacctaggggtgaaattgctgggtcatatggtaactctgtgtttagctgtttgaggaactgcctgttttgcaaaacagttgtaccattttatattcccatcaacaatatatgagagttccagtatcttcacatttttgccaacacttgttattatctgccttttttataatagtggggacaattttcagaatgaaagtgagcccttattaattatcccaggcatggcatgaaccagtaatcaaatatcctgagctagtcaggatatttgattcttctagaacttttgggaatgaggcctactcagtagcaaaaagtagggggtgatttgggggcagtggagctaagtgccagtaagtagtggttgttggatatagtcaacaaagaggacatatccaattttattataatatcctgtgggtagatattactgtttcaaaggatcaagcacatatttatctggaaaggaatcaagtctttaaaatcatttttacaggagcaattatgttattattcttaatagtaagatgcaataggagatcagctttgttcaataggtaaaataactacccaggtgaaccatagccattttgtccaaaattgattcccagaggcaaatttgtagcaggtaatttaactactcttactttattcccagggacattctttttacattgaagtgcatctctttcctaggcctcaactgagctgcttgtgcagggtactagatgttcaggttttacaaatatttgccatcttattctgtctttttacactgttattgacacactgatggtgtccttgtaagatgttttgagtgggagtctctagccctccaccctagcactgtggcaggtaactcatctggctagcagtagctcatggtactcttatgggatggttggggcgatgctatactgtaaatatcagctaacccagaaaccaagacatcacagacaatcagtggtggtgttggcacaataaatacctgctggactttaatactcataaaatgtatcctttctagatctggtgtgttggcttttctttattgatggaaattatacatcaaaatgtttccctttcttatttgctgtcagaaagcttagagctgattttttattgttcagccacaatcgctagttcatcagtgtctttagtataacaatttctgtgctctttccaatgtttgtttaaattgttttttttaactgtcctaatcttatgagttttctttaacattgttagccacctttgaattatttttaaaggttggagtataaataatttttaaaactcccatccataaaagataactatcttttctctccagaactataagtctcttggaaatttgatttgatttaggtaattggccctactacatagtaccttccctctctgggctcttgaccatctggggttatcctatgtttgtcatgctagggaagcgtaagaatgttctttgggtattctttcagaattaaataagaaaaggcaaaatgtttgataaacagacatttatttcaatattaaatatccttcatataaaatgggctgaagtctaaattgcacgttcttcaagttgtccttgatcaagatgtgtagatgcagaatagttccttcatttccacatcttttctagtgagcaggtgagagtactttctctgaaactgaagagagaagtgtcctgatcctaaaacctttcagagagctgcctgactgcgctgctcaggaaaaaasgggtgctcaccctagcatgatagggatggccaagtgccttggggcacccagctgttcagcggcattgtggtgaaagggaagtacagtcgatcctcattttttgcacattctgtatttgagaatttacctacttgctaatgtttgtttatgtctaatcccaacatcaatacttgcaggacttttgtggtcatttgtggatatgtgaaagtggtaaaaaaaatttgaatcctcctatgtgaatgttcccagctgagatcgaacaaggggatgttctgccttcctattttagctctaatactataaatgtgtccttttctcacacatggctcagaaatgtgccaagtttttcacattttttgtgctcttcattggtgatttcatggcttaaaatggccccccagccatagtgctgaagcgctgtctattcctaggggaaagaaggctgtgatgtgccttttgaagaaagcacatgtgttagacgagcttcattcaggcatgagtcatggtgctgttgtccatgagtcccatggtggttaatcagcactatatatatttaatgtggcatctttaaacagaaaccaacatagagcacagttaagtattgatcagttgaagagaatacctcctgtgaccagaggctcacaggaatctaaccctgtatttctcctaggagcaatgattcaatatttatgaattcagtgtttggggtgacttgataaaacataactaccttgcataaagagaatcaactgtatgtctttttctgctcttataattcttcatgttggtgggcccctgccttcagccccaaagaatgcagcatggggcttattatttcttgaatctgtttttttttttctggagaatttcattcaacaaattatgaatattattaggtgttgaactgagcttttgaaaacttgtcagattcatcttcaagatttttgttccaaacatccaaatttatatactcattgtgagtttttggatgttaacaatagaatttgattcattctatatcctttgagcccacatgatgcatttccctgtgttaaggcttatttgttgctcagttgagtgactcattcaccacttcttacttcctggaggtttagtaccactcttaaaaatagcaagaggccaggcatggtggctcacgcctgtaatcccagcactttgggaggccaaggtgggtggatcaagaggtcaggagatcaagaccatcctggctaaggcggggaaaccccatctctactaaaaataaaaaaaaattagccatgtatggtggcgggcacctgtaataccagctactaaggaggctgaggcaggagaattgcttgaacctgggaggcggaggtcgcagtaagccaagatggtgccactgcactccagcctgggtgacagagcgagactccatctcaaaaaaaaaaaaaaaagggtggaaaacattgcattgcacaatgggttgaagtgagaggtctgccttattttggggtttgtagctccctccctgtgctggaagggggctgttgtgagtgccccacccttgcagatgtcagcaggaaccagtttctcttccagagctgaagctccagcgtgctgcctggcttgaagctgctgccctctgtcccaactctcaccagctctcttgggttgttccctgctcttgatcctaatcagtgcgtgtttctcacaagcctcttcagtcatcatgttgacccaatccccagacaatgggtagtaattaagtcaactttcataaggttatggtatgcgaagtgattacaagagattgcttacaagagcagttagaataaagagttcaggtgagggcagtgtctttagtgagccaataagttgtctataagttgattgggaaattgtttagtctgagattacaataagatgttttctgaagcacataccaatgaacagattccttgaagagatttccttacagaacagtttgcattttcatgttgaaaattagcttagtgattatcttcatttaacaggttaaaaaaaaaaaagaaaaccaaacctgatgaaagggtgacttggtatcaggaatggggaggtgatttggtgaagggatagtgactaccactgaccactaaaatagcttcatttgtttttgtattctcagtgtctcatttcctcccatgttcctcttttttattttatcattattttgttttaaatttttaatttttgtgggtatatggtaggtatatatatatttatggagtacatgagatattttgatacaggcgtacaatgcataataatcacatcggggtaaatgggggtatccatcacttcctttatgtcacaaacaacccaattatgttcttttagttatttttaaatgtaaatacactgttgttgactataatcaccctgttgtgctatcaaatactggagcttattcattttattttactatatttttgtactaattaaccatccccagttcctgccccacccccccactactcttccaagcttctgataaccatcatcctactctctgtctctatgaattcaattgatttaatttttagctcccacaaataagtgagaacatgtgatgtttgtctttcagtgcttggcttatttcacttaacataatgacttccagttccatccatgttgttgcaaatgacaggctctcattcctttttacagatgaatagtacttcattatgtacttcagtagtattcctaactatccatcaacagatgattggataaagaaaatgtggtaactctcttctaactatctcctaactatccatcaacagatgattggataaagaaatgtggtaacattttctttatccaatcatctgttgatggatagttaggtcatttccaaatcttagctcttgtgaatagtgctataataaacatggcagtgcagctatcttttcaatatactgatttcctttcttttgggtatatacccagcagtgggattgctggatcatatggtagctctatttttagttttttgagaaacctccaaactgtccttcatagtggttgtactgtaataatttacattcccaccaacagtgtacgagggttccctttccgccacatcctcgccagcatttgttgttgcctgtcttttggattaaagccattttaactggggtgagatgatatctcattgtagttttcatttgcatttctctggtgatcaatgatgttgagcatctttttatatacctgtttgccatttgtatttcttttttgagaactgtctattcaggtcttttgcccattttaaatgggattattagatttttcctatagagttgtttgagctccttatatattttggttattacgctcttgtcagatggttagtttgcaaatattttctcccattccgtgggttgtctcttcactttgttgattgtttcctttgctgtgcagaagctttttaacttgatatgatcccatttatccattcttgctttgttgcctgtgcttgtggggtattactcaagaaatctttgcccagtccaatgttctggagagtttccccagtgttttcttttaacggtttcatagtttgaggtcttagatttaagcctttaatccattttgatttgatttttgtatatggtgagagatagggttctagttccattcttctgtatatggatatccagttttcctagcacccattaaagagattgtcctttcttcaatatatattcttggcacctttgttgaaaatgagtttactgtagatgtatggatttatttttgggttctctattctgttccattgctctatgtgtccgtttttatgccagtaccatgctgttttggttactatagctctggagtatgatctgaagtcaggtaatgggattcctccagttttgttctttttgttcaggataactttggctattctgggtcttttgtgattccacttaaattttaggatttttttctctatttctgtgaagaatgttgttggtattttgctagggattgcattgaatctgtagattgctttgggtagtatggacgtcttaacagtattaattcttataatccatggacatggaatatcttttcaattcttagtatcctcttcaatttctttcatcagtgttttacagttttaattgtagagatctttcacttattttgttaattcctatgtattttatttgtagctattttaaatgggattactttttgatttttacactgtccactgtttgcatacagaaatgctactgatttttgtacgttgattttgtatcctgtaactttactgaatatgtttatccattctaatagttttttggtgaaatctttaggtttttccaagtataagaccatatcatctgcaaacaagaataatttgactacttccttttcaatttggatgccttttatttctttctcttgtctggttgctctagctggtaattccccatattccctcttaccgttcacttctgcctctgctttgtgcccttagcactggagctacatcttaagaggtggggtgacatgttgatggtatttggctgagggaccctgaagcttctggatcttgcttgtaattgtccactctgttcaacaagatacctagggggcatgtgtgcacagaagatagtgatttttccgggctcttgttattaaaccttggccccacactcttaatatggaacactgctttggcagaaggaagagctaaccagagataccacttccttctgggaagaagcagcagggctgggagaatcctagcccagactttctctggaagctgctccagctcctgascaggcttatcttaccagccgggtgggagttaggaggactccggagtcacacagaaagccaaaaatctcctgaaaacaataccctttccagtgtagatcctaggctcacccctcattgttcactcaggaattaaggcagctctgggggtaaccccatttatggaatccatgcaatgatggcattgtgggggacactggctaagctcccaaggggatgtgctataactgcatcgcagtggctaggccccacccttctcatgcctcttcccaggtcactatggtgatgagtcactaatatcaagaagtaaagaagaatggcagtttataaaagaccataagatctccctattccaggatcaatggtacatatggttccttttctttcttctttgtcttacttgtcctttaaaacctccatttgagagctgcctcttccagaaagccttccttgaccacctccagctgaagtctggtttggagctatcttctctgagctactacttgccaccctggaaggctgtggctggtacgtgatcttgagaaagtagttccctagctttgtgggagtggaatctagatgacaaatggttaaggagttggggataggggtgtagatgggacagccaaggctgatacctttcaaatttcaggttgaactgtggaatgaagaaggtagtgactgaaggtcactggggaagtttatttatttgttttttgatgtgaagaacttttttttaaggcagagaagaggagtattggaaacattagtaaaatagggaataatcaacaggtcatggcccaggaggaggccagaagaagtggaatcaataacagatggaaggaagtgaaagggaagacacagagggagctctggctggacatccccaaagttgttcaacaatgggagccactgtttcttgaaagttgactagatgctggatagtccttatacattctcatctgatttccacagcagccacttcacattctacggatgagaaaaccgaggcttataacaggttcttcaggtggtacatgttggggagggatgtgaatgtagtcagtgcaacttgcagaatctgctctaccagagtcttacttctcaaagtgtggtcctcggaacagtaccacctgggagcccattagaaatgtcaactctcagccacatcctcagaccaactgaaacagacctgcgatgtttacatatgtttaggtctggaaaccctggtctaaacttctgccccttgttctccttgaagtgttagatgttggcttggctccctgcttagggtaaggttattggagcatgccgagggcagaggcttgagggtagaggggaacagcaaatcatgggaatgtgatggaatgtattaagagagagcttctagaaggttatgatatctattagttcacaggttatggctaaactggtaatgacttcatttaagttgatatcattgtactttgcagagagaacagccaagtaaccttggttgactctggttgttctaatattcttagctatccattctcttgggagggtcaaaccacagctggctgatctgttatcaaaggatttgtggtgcctcgaacatgtcctgttatttcacaatcagtgccctttgtamatatggttccttttatttcttctttgtctgacttgtcctttaaaacctccatttgagagctgcctcttccagaaagccttccttgaccacctccagctgcagtctggtttggagctatcttctctgagctactgcttgccaccctggaaggctgtggctggtatgtgatctttaaaggacttagcatggtacctggcacatagtaagtgctcaataagcactagcttctattattagcccagaagtaggaataaaaacagttaagagtagaacacatggttcagagggcagcatagtataaagggggcaaaaataaccgaaggtcctagcaagagccatatggaagtggtcaactaggaggtttctgtgctgggaagggagggtgagaaggcaagagagaggcagtagaaagttcattattttttaatgtatttttattgtgtatatttaaggagagaaagtgatgttttgatatacctatgcatagaatgattttgaatgggcctaattgctacgacgtcagttacaagacggaggagaaagaagacaagacatgaatttaaagaaacttgcttatccaaatcattcttcttttaagaaagctttrtattcattatagctgattataagagttaggacaaatttatgatgtggcagacttgtgttttagcttattagtgtgtctctgtgctgcactgaagcccttgtcatcactgcagtgtacgtagctcccatttatgtactttctatagaatctgaagcctaattttaacattgtatcgttttttatagttattgacactttgcttctatcctatcaattctatctgtaatttatttcaaatcaatttcttgaacaggcaggtaatagcytattatattatttttcctatgggaaaatatgatcgtttattaatttggttttttaaaatttactaaacatctattacccagaaagcactatagaaaatgcttttgagagatgcagttatgaactagcaatcgcccttgtccttcaggaagctgacaggctaggaggggagatatgataggtagagatgactttaaacacaacaatgtgagatgctgtaagagaggcagggtagtacacttactgaggaagaataacttgcttttgcctggggacaggagtacaggataaaagctttgaggcaaaggcagtggttcaacttgaccttgagattttgtctgggtttgacaggaagaaatagggcaaaagccatttgaggtggacaaaatagtatataaaaaataaagtttgatttttattaacacaatggtgaaaagagagaacttcmaggtagttccatctgttttttttttatttattttttattttttatttttttttgagatggagtttcattcttgttgcccaggctggagtgcaatggcatgatctttgctcactgcaacctccgcctcttgagttcaagcaattctcctgcctcagcctcccgagtagctaggattacagacatgcgccactatgccyggctaattttgtatttttagtagagacaaagtttctccatgttggtcaggctggtctcgaactcccgacctcaggtgatctgcctgcctcggcctcccaacgtgatgggattacaggygtgaaccatcttgcccagctagttctatctttagactaaaatttaagtatctataaaaaggaggaactgctgtttaatgaatgcaaatgtttaggtacatatatattatctcaattaatcctcaaaaaatccctatgaggtagggaggtattattatttgcattatagaggtaaataagctgaggttcaggaagttaatcattttgctcaaggccacacaggtcatctgcggcagggctggaaatccaacacagatctatctgattccaaagctttccactgcttcctgctgccttcctgcggacccattcataagactgacatattcattcattccactgacatattcattcattccacaagtagttattgagcatctgacatgtcccrggtgctatgctagctcctggacatgcagtgatggccaacctggcctagctacatgtgggggacaaatggaggcacaaatagtaccttggtattctgagacctacagatttccaattaagtataaatttagaagattaatgtgctttattgatctcatcaaatagcctattgataaccctcctcaaataactagtaaaggcacagtgttcactgaggaaaaacagatgggaaaatacaggatatttcaatgtcatagttggaaaatttacaacttaactattttattaaaatgtcagtactttggaattttagcagttgtagacctgagagcccgagaggagactgcacccatgccatgcaaattgtcataaaagttttagataaaagttcatatatacgtttcagagagagaaaaagagaaagagaaagagattttgttgacagccagatgaaattaagtggtcagaaatttaatccactggcccactaaaagaaatattttcaagatactgagaaatgcaaaaaaaatgtaaaaaccaagcataatatcaccactttacaccacatagtatcacamacacacactagttgagtacagtggtgcccacctgtagtcccagctacttgggaggctgaagcagraggatcacctgagttcaggatttgtgaccagcctggacaaaatagtgagaccccatctttttttaaaaaagaaaaaatatatatactgtatatgtaaagtccttccccttgatcactactcctccagccccaccctagaggtaaccactgttaacaatgtggagtttaccctttctgaatttgttactcatagtgacaaatctgtttaggtttgcccatacaatctttcttttctttccttcccaaaaagaggaccacttaaaaaattcttatttttctgccattatccctttggtctcattaattaatttatttttgtcttttaagagaacagttttaaattgcttcttgtgagggtgcaacacaccagtaggattatcagcaaagtgtagacaaggctatgaatgtggatctgatgcttgggagaagagaattatcttgtgactcaactaaaatacaaccaaagactcaagaagttatggatttgctcttaattgctttaattgctgcacaattctccttagttactctgtgaacttgtaagaatccacccacagtaaaagtcgaatttgacaagttgtgagaaattgttatgaggattacagttctttgtgtcccacgtgcaaagtgcttccaagatatttctttaaatgttgaatttcatttaaatatctcaaatgaagaaaaagatatctaaccgcatgaggttggaaagcttaaaagtaattgttatcctatcctacagacacaccaaagggtacttaaagatgatatgaagtgggatataaatatctatactgttgtgctctgaactaaagcaagtagtatatatttgttatcctttatactgaattaattatgtaaaaaataaagttcaaaatatgagtgtagttcctgtgtgacgaattgcctgaattactcaagtgattgtctcaaacctctatgtcatttgtttgtagagttctttagaagaacttagtacaattatctgaaagtgtctctaaggtatgacayttctgtgtgcattattgtactcagcatttaaaacatggcattgcactgatgtccttcctgtttcttaaaataagccaagtcttttctggcctcagggcctttgcgcctgctgttccctctgctgggttgctgacgctcttctctgtatgaggaggcagaatcactcctcatccttcagggcttggctcagctcaaaggcctctacctcagagaccctcccaggatcacctcatccagagtgtcttctccctccaatcacttcctattatctgatttattttcttcatgccacttgtcataatctgtcattctcatgtttgtttgcttactttttgagttaggcctctgccttggcacccagtggagtcttcaataaatacctggtgaatgaataaagagctttattagttattcttttcctcattcgttcatgccttcatttatctgttcagcatcagacacaatattgagtgtctaatgtgtctaactcacagtgctggactcagtagtagtgattgcagtggaattttcaggtaattaatgcttagcccttcagataccaacatttacttaaaagtaaatattggctataaataagtaaaggataaaattgtaaaatactggatgagagtattccttaaatacattacagcacatctcagatagaagctctagtattgatatggtgtggtcctcackgtgaagtgtccttacagtgaatttttaaaatttacattttggtttttctgtgagcccagagggatgccacttcctttaccgtaactctgactagttgctccaacaatggccccttcctgcctctagacacaggggtgctggtcactgatctcctgggtcaaaagcaggataagacagttgctttcacggtggttgttctcaccatgaaccttgacattccagttttcccacagcatgtgaaggccttaagttgttcagatataaccttgattctccaaggggtgstgtggtagaacgcrgaaggagatttttggaaaattgcatctatagagttaaatactatgaatgtttcttatcttgtcataaaatcacctgcatacattctttttataaagccatctttgtaagatgagatttatattaatgtaatatgttagtgctcagatggcctttagcaaaggattttaggaaacacctattatctatgactggggttgtcagaatgcaaaaattcaaatcatcttccacataggaaactcttttctgggttctgtgtttgtgcttattatttcggtgtttcccttttaactgttttcagaaggcatcttctgacagtggcaacatcaaactgcaaaatatcataggcttatttggtggggattttacttctggatttgttcctcttgacatgaaaaacatatattctctgcttcacatcaaaaatgtaggcttacttttaagtagctatatttttaaaatctgwgtcctgtttttgatctagtttttattatatcttgcattttacctgccatttctcttctttctcttttgttcattttacaggaaatgggagatcagagatgctcagattttttcagcgtagtttcccctaacatcacagctctctcctgtctcttttattcacagtgagacactaaagacttcccagtgagcaaatttttcacataggtgaaacttactccattaaccgctaaaactttgaagaatgattattttaatcactctggaaatacatttcacagttccttcatttgcaaagtaaactatgcataagatgtacatagaatgtatgcctatctttcacagagtcagagccagcctagtgagctttcacttttgtccatggtttggaggctgttgagctaatcagagctgttttcctgggcaccaaatgctcttatgtcttgcctctgcctaccactctcagctgccatttcctgggaccatcgctgggtctttataattctcatgttttccttattgtaatgacagctggccgagttcacgttcaagtttacctccacctcttctataggtaaacgtctcccagcttcagtactctagagccactgtcttgcagttccatgctcctgttaggttctggtaggtaggaacctgacttctggctaaagggaataggggatgtaatactaagttgtcattacaaatcccttaggccttactgatagccttgctcaggatatccattttagtttttcaactactgtgttctcatgagatggaaatcataaagccaagtgtctttgaagaattgtacttgagattcagaacaagactccatgttattttttaaagagagatacttcttttcttttttttgagacrgagtctcactctgtcgccctggctggagtgcagtggcgcgatcttgtctcattgcaagctctgcctcccgggttcatgccattctcctgtctcagcctcccgagtagctgggactacaggcaccygccaccacgcccggctaattttttgtgtttttagtagagacggggtttcactgtgttagccaggatggtctcgatctcctgacctcgtgattcccaaagtgctgggattacaggcatgacccaccgcgccaggcccaaagagagataccttttttcaagtttttgagtggctagttttgcatattaatgctaacactgaaaatagtacaacatcaattttttacgctttttatctttttcttgacaaatactagtttaagttgctatttcaaactagttcattcagggtatgaaatatacaatggggaaactttgagactcatgttacttcctgttgttagagtgcttgatttagtgctttaattactatacactactgaaacaaagtgaatatacaycaccttaggaaatcacttgttattttcttgaactgttttgtttcatctacaattacatctttatatcacatttcacaaaatactggtgattatgtggtgttctaatgagtgtgtatagataataaaactaagaaaatggagtttagatttagtggggctaccacctaaaaattaaacttgcttagttccaaatttccaattctttgatgatttgtattgtaaacaggatagtttttttattacatttacagaacatgggcatgacttgaacaaaagttgctattcttaagtaaattacttttattttatgctgtatcttgccttcttgatgttctagatggtatgtccttttagtcccactagagtctataatgctactgtagttcccagcttccagttgtcatctgtgtggtgatgccataagcattggaaagtgcactgtccttatagccagaaagcactggttccttcaccctttagctgtggctctcctccccgtcaatcctctttttttaaaagccaacgcttattgaggacttcaggttatatgctgtgtgtcacgtgttttctagatgttccttcttttaattatcacaagaagcctatgatgcaggtattagtatccacattttacaaatatgcagactcaggcccagagaggttgaataactccaaggttatccagctggttagtgacaaaggtgggrtctgaatacaggtcttacttccaaagtctgcacttgaattacctcctgtaccacctgtgctacctctgtgcctctctgaaccaactttgggttttctggaagtgagagtgacaatctcagtctcatggggttgtccaggggcacaagtgaggcgagggaggcagagcatccttgtcttatgctgcacttgagcaatataggtagtccagcctagacagtcatcttcttttcattgcatgcctttccctatttctggattatagatagcagtgtctcccacctgggccagctttatcctgacgcccagcatacaccccacctctgggttggtgtgcattgaggaagtgcaaataaagtggaatatgcctcattaagcaggaaagtagtcatgaggaaaggcatgcacttgagagccgtacctgggctctttatcttctgacagataggatcattcccaaggtcrtgagagtgcaggggattgggtgccaaccaggacactgaagagctcccggagcctgtgcatggtgtctagcccttctgtcttcaggcagtcacgtgcaagccctcccctggaaggattgtcagaccacacctgtgccactgctgctgtctcctccctgtcctcctgcaggagggtgtgtgtgtgtgttttaaatttccaatttactatggaccaagacccttgaaaaatacaatgaaaacaaatttctggaaaaatagtttttaaaaaggcattcaaaatgtaagcatagtattttattagaagattcaacagcaagaaaataacattgcaaaaatgacctggcaatgccaaattgctggaagtttctaagcacttattgtcagtktttttcctaatctctttactgttgggtagcagttcacagactggccaggcgcggtggctcacgcctgtaatcccagcactttgggagtccaaggcgggtggatcacaaggtcaggaatttgagaccagcctgaccaacatggtgaaaccccgtctctactgaaaatacaaaaaaaattagctgggtgtggtggcacatgcctgtaatcccagctactcaggaggctgaggcaggagaatcgcttgaaccggggaggtggaggttgcagtgagctaagatcgcgccactgcactccagcctgggtgacagagagagactctgtctcaaaaacaaacaaacaaacaaagaaacaaaaaacagttcacagaccaccaccagtgcacagactgccggcccagagcctaccctgactgaggtgggcacttcatatgtgaatgcaggtccacctgccgaggggctggaggtgtgcttgctgctgtaaacttgctctgtggaatgcrtgcgcaagccccaggccacagtgcccgtggaagcgccacttccctgctgcccttcatgacaccactgcccttgtgacttggcctctacctcagctccagtttcattctgtttgcctggtgctggagctcattcctgaacctaactggtttagtggctgtggtactgagagggtcttccagcgtccctccccgaggcctagattctgttgtctggatgcctagctgttggccaggattctaatccaatgttttagtttcctcttgttgctgcaacaaattgccgcaaatttaatgacttaaaacaacaaaacattattctcttgtagctctggaggccagaaattcaaaatgaatcttatgggataaaaccaaggtgttggcagggctgactccttctggaggctctagggcagaaatcactcttgcctcttcccagcttctggtggctgccagcattctgtagcctacggccaccttatcccagtctctgcctccatggtcacattgccttttcctcttctgttgccaaatctccattcgcctccctcttatgagaacacttttgattagaggtaggccccccaccccagtaatccaaaatgatctttccaccttaaggttcttaacacaatcacacttgcaaagtcctttttgccctgcaaggtggcattcataagttccagggatcaggacctggatctctttggagggtattattcagcctaccacgacaatgcttgggaatttgtgtcattatcacttcaccccctgtaaattttgcttctactgtgcgctactccaacccctaccccacctcaactggactacctggtatatgggatcatttgtgggagcgatctgaggttttcagagtctgggggtgttggtggcagctaatacttagtaatgtgtgtttcagattctctgctaaggactttatatactatcccatttaacagtcacgtcaacccaagaggtactgtggcctggggaagccacatgcaatcctgttcagcctgacttcagagccagagtccttacctgctaactgccccgtggacagaggcagaccctgtgatttgggcttaatttaagcacgtctcttccccacagggagcagccacatggcagtcctagtgctccagcctggccctgtggtcccagcttcttttctttcccagatagcctgcaggatgcaccttcccaagagtggacagccaggatgagcttattcagctctctcccagcaggataagtgcagctcaggaacccaagcagaggactgtgtgaataaccctgagtttccaggcaatctggctctcagcccccacactgcgctgccccttggacagtcagggagttggcagtcagcagacgctggctgagtttggatttgtttgctgatcctgtcatgatatgtcattaaacattcctggctggaagtcagacatgagagtgctggagggtgttctcacacccctgtgctgtggggaggccttcccttctttctggctgccctggtaccctctagagcctcctatctgctgctcggaggcagtgcctgcagcggctggactcctgcagcagctggaggtggaggaaagattcttaggccgtgagtcctcttcttccgacagcgaatttgagccctggtggagcaatgtccggcacgctcaggaaagtgtgaaatctagaactctctgtagtggcctgaggcaatagtcagacatggctggtaragctgtgctgcctcagaagtcatcctggataagctgctctggatccccatcgtggaagcataaaatgtcaagcagaaggatgttatgagaattggaacctaagccctgtgctgacctcggggagcactccctggggctacctttgctgggaggtgcctggcccagacctgtccaacctgggcctgcagccaggaacattctcccagagtagcaatcttattaaattccctgtaatatacatgttttaataataaaagtatggatatattattgatgaggatacaaatagctttacgtcttttacattatgtaagtaagcactgaagttatttcttttttaaaaaaatagacttaatttttttacagcatttttagattcacagcagaattttgcagaaagtagagttctcatatattcgaaaccctgcaccaccccccactccctggagccatatgcacagcctcttccactgtcaacatcccccaccagagtggtacatttgttacaattgatgagccaacactgacaacaacataatcatccagagtccatagtttacattagggttcactcttgatgttgtaccttctggggagtttgacaggtatacaccactgtagtatcatccagaaaagtttcactgccctaaaaatcctctgtgccccacctattcatctctcccttcccactaattcctgacaaccactgatctttttaatatctctacagttttgccttttccagaatgttatatggttggaatcatacagtatatggccttttcggattgacttgactcctttcacttagtaatatgygtttaaggttcctccatgtcttttcatgggttgacaaactatttctttttagtgctgagtaatattccatcattagaatgtaccacagtttatttatccagccacctactgaaagacagcttagtttctccaagtttgggcaattatgaataaagctgctgtaaacatctgtgtgcacgttttgtgtagacataaattttcaggttatctgagtaaatatcaaggaatgcaatttgctggattatatggaaagagtatgtttagttttgtaggaaaccaagtcttccaaagtgactctaccattttgcattttcactgacaatgaattagagttcctgatgctccatgtccttcccagcatttagtggtgtcagtgcttgcaatttttccattataataggtgtatactggtatttcattgttgttttaatttgcatttccctaatgatatgatgcagagcatcttttcacatgcttatttgacatctgtgtatcttctttggtgaggtgtcttttcagattttacccatttattaataggttgttcattttcttatggttgagttttaagagttctttgtgaattttggttaacagtcatttatcaaaataattttccaaatattttcttcctgtctgtgatgtcttcccattctcttgacagtatcttttgcagagcagaaatttttaactttgaattaagtctaacttatcaattacttctttcatggtcatgcctttggtgtcatacctaaaaagtcattgccaaactcaagattgtttagatttcccctatgctatcttctaggagttttatagttttgcatattacatttaggttagatttcctttttataaactttttgattgaagaataatatgcaaacaaaagtttaaaagtcataagtatacaagttgatgaattatcacaaagtgaacacattcataactatcacacaggttaagcaatagaaccagtacttcagaagcctctcttgtcccctttctcaatcatagctccctccctttctattcacacttttaaaaccatagggtaatgttgcctgtttttgaacgttaagtaaaatgaagtaatatagcatatactattttatgtctggcttcttttgcttaatgttacatttcagaaataatccatcttattgggtgttgcagtgtttaatacattttcattgccatgtagtcttccattatgtgattacatcacaattcaatgttaatggacatttgagatgtttccatttggagctgtcatgaataatgctgctgtaaacattcttggacatatcttttggtgctcactggrcacattcctattgggtatttacctaagatagatagtgagtgtcactatatttccagtttgtgccccactgtcccagcttatgcctagacgtccagagtaataattttcctccctttcattttcagaagtgtcccagtttggctaataaatgaattatgtcttttgatgaatagaaatgtaatgtagtccaagaaatcttttcctaccccgaagtcatgaagacagatgcctgtataatcttttagaagtcttattgttttagtttttacagtattttatgttcacctagataaaataaccttttatatttaccacttgtatgctctttattcactcctcaacagtcaggtttccttctggtatcatttcctttaatctgaaataattattgtcatatttcttataacgaagatctgtgggcaatgaactgtccttagttttactttgtccagaaatgtcttaacttgaaagctgttkttcctgttttctgtttccgtagtttctcatgaaaatttascagtcatctgaatcattgtcccactgtgtgtattgtgtagtttttctcgggccgcttttgtctttggctttcagcagattaattacaatgtgcctaaacatagttttctttgtatttttcctgtctgtcatttgttgactccttaaatctgtaaatatatgccattcagcaaatttggaaaatttcccatctatttttttcccaaatgcttttatctcctctcacttttctccacctgggacttcaattactaatgttaggcattttgatactgcccacagatccctaggtctctgtttatttttttcaatctttttctctgttcttcagattggacaatttgtattgatgtattcatgttcagagactttttcctccctaatctctagtctgttattaatcccatacagtgaatatttatttccaatattgtattttttcagttctaaaattctcatttgttcttacgttttctatttttggctgagagttcttctttatttgttatgagttttttctttatttttctgcactgaggttaatcataatagtgatattaaagtctttgggaattccaacatctgggtcatctcagggttgccattatgtttcttaggtgatgtgatttgggattgtatcatgggcattgtgaatgatatgttgtggaggctctttattgtttcattttagcaggcgattagcttgattacactcacagtgtaaacatgatgtcacctgaggtgggtggcagctcaaatctcagttcagagatttttaaatttttagttggactccttaaaatcttccctgtgcatgaacagttccaggatcagccagagatgtgagcagagtttgtacacaaaatttaggttccctcctcattctctagtaactctggttgccccaggctccatcttctggttccttaggcaagattgatggtaggttctccatcacagttggaccgtcccatgccgtggtgtgactgtggcctgccctcatggcaaaactgaaaaactaggtaactcaccagatgctagattccttctccagatctttctccaaatctgcctgcttttgttcacgctccagagcccttaggttgtcattttttgtgtgttttgttaaagtgtgttgttgttatcagtgagagggttggtggttataggaatttactcgttcttactggaagaggaccccagttcattgacattaaatataattagtcatgtatttgcatttaatgctgctatcttactatttatattatacccacctattctattcagaatgtttttcttatcttgatttctatccatttaaatattttccatttcctccccttttagcttattagttaactccctgtttataccctttttgtaattagtagaaattacaaaattacttttaccttgttaacccaatgttaatatctctacccttctttaacacagtagaaggaatgtagaatacttaaattccagttatttccctccggattccatgctcctgttgtcgtgcattttaattctatgtatttttaaatcccagaagaaattactgtcattttctacactcaatattcatttagatttacacacaaatttaccttttctaaatgacattattttctccatctgtgagcttccatctgagatcatttgccttctttctaaagaccaccctttattattattttttttagtgcaatagttctagtaacaaattctctgtttttgtttgtctggaaattcttttattattattattattattgaagtatatttttactaagtatagagttccaggttgccacgtattttatttcagcattttgaagatatcatttcattgtgtcccacctcccattatttctgtttttccttggctatttttaaacgtttttcacctatattttgcttttaccagttcttctttaatgcacttaggtatttttttttcttcatatttttttttctctttagggcctacagtgcttcttgactttgcagcttgatttgtttcttcaatattggaatattctccaccattttctcttcaaatattgttcctgacgcgttctctctaatcctactgagagtgaaattacatgtatgtgacaccttttctctgtgtcctggatgcctctcacattcttcttatatttgccatccttttgtctccctgcaccttagtctggatctttttctttttttctgacatatattccagttccccagttctctgttcactgtgtctaatatccatataaacccatccatctggtaactgattttaacaatggtagttttatgactaaaatttccacttgatttttaaaatgttttctagttctttgtcaaaatgttgtttcttgtcttttaattctttgracatattttcaagtctgtgtgtgtaaccctagtatctggatcttccacgtgtctgtttaatgttttttccctctcttggcttttggtcaacctttttttcccttataactgcttatttcttctgagcattggattttaaatttagagataatttgatgctctgaatgatggcatattcccgcagacagaatttagttttccttctagttggcagctgggaaggggacaggcgataataactcagtgactgagatgagtcaaagaaccatttcgtcctatgtgaaggctggcctatctccaggtcaattctgttcctagattgcagctcattggggtccccattgaaaacctaacatgtttgccaaggtcctcactctctgatgggccctgaactccagttttatccttccatttctgtgtggtggatggaagctctgctcagcttctcggcttctggaattgtcagtggccttcaggggatatggacaccaaaagccacattttccttcttgccttcctttctctcgcagatcttggtctgacaaagtctcactgcactggtatctatctgatactttcaaatagatttttaaaacttctttccaatttctctagttattcttattggagagtcggcccaagaaaagtaaggttcagagagaataaataaattgtccagggtcatacagaccctgaaagtagaatctctatgaaatctatttaaataggtggcacaagaccagagaaatctgagacttacagcagcctgcatgcccagccttcaccatcctttgtcatttgggtattaagtttgacagttgctatgtttaactctcttgttttacaaaactgatatccatagagatggtgtgatttgtccatgaccacacagcgaggtaatatgtgagttggggtaaaatctaggtctgtgctcctcggttttttcctgttaaatcttgctgcccccatctttttttttttttttttttttattgttacttaggtacccagacctacatcccagctttagtaagacatctcagtgctcagtggtccaagaagattcttctcatttgtagaaaattgtccttgatttatgcagccacaaccacatatgagtgtcacctgttaccttcttttttcccctctttcttcgcttctctttttatctctgaatttttacattgccactgacatcttgcctgtggctaatagacacgtccacactgagagacatgctctagtagagtgggttcaggactgcataattagtttgtcctcttttatgcctgggaatattatatcagattctctaaaaggttttgaaacgtaaggtgaaaagggaaatgataaaataaggcatttgagatttttaaactcatgatcagctgcttcccttgaaaataattcataatctcttccagaattgcttgtaaaggcttttaacttttgtggtttatctgctgttctcttaagcacatggtatatatttataggttcttaccttaaattttaggcagaatcatgaattagatactgggaataaagctgaccagaagtaaatcatttcccacatcttatctttgtaaggcctgaaaatgtgatattccacgctgtttttgaagagaaagcattttggtggttaccaggaggaaagaatggggcaggttggaagtgtcactggtctggcagcctggagacctcaattttatcccattgtgacctctcacttatgtgcgaccttggacacatcacatacaatttaggccttatttggcaatatgtaaaatgaaaaggttggacaagataccccttgggagccttacaattctcaaatttttggaaaactatcctttactgtgaggccagtgtctggaacagcattttgtaatatgaatgaggacttaaagcaattttttatttcctgtgatcttgtgggaagagggtgggtaaagttagataatctagaagttgacatttgtgttttcatgtaagcaagtcaaatgttctggactacattttgtttcaagctaaagagcttatgctgtgatgacccagcttattaagttagataacaaatgtaaggcacctatttcatttccttatcactgtggggctcagtaaggagtttccaaaagaatgaatgagagattatcatcataatatctatcacttatcaactgcctgctgtgccaagatacatccgtgagtaatacagatttggcatctgtcctctccaaggggtaagtattattacccctagttccacgtgtggaaaatgaattccaatctggtcttacattaaaaaccattgatgtggcgcctgcctcgcgcactgtgtgtgcacgctgcaaagaccagcaagctccttggaccttggagcaggcctgctgccttcatgtccactctcctcatcaatcagccccagtatgcatggctgaaagaggtggggctccgagaggaaaatgagggcgtgtataatggaagctggggaggccggggagaggttattatgacctgttgctctgctaacaactagccaatagcaagagtccgacaggccagtgtggcagactatgaagaaactgtaaagaaagcaacagaagcatggaaaatctgggcagatattcctgctccaaaacgaggagaaatagtaagacagattgacgatgccttgtrggagaagatccaagtactaggaagcttggtgtctttggagatggggaaaatcttagtggaaggtgtgggtgaagttcaggagtatgtggatatctgtgactatgctgttggtttatcaaggatgattggaggacctatcttgccttctgaaagacctggccatgcactgattgagcagtggaatcctgtaggcctggttggaatcatcacggcattcaatttccctgtggcagtgtatggttggaacaacgccattgtcatgatctgtggaaatgtctgcctctggaaaggagctccaaccacttccctcattagtgtggctgtcacaaagataatagccaaggttctggaggacaacaagctgcttggtgcaatttgttccttgacttgtggtggagcagataccggcacagcaatggccaaagatgaacgagtgaacctgctgtccttcaccgggagcactcaggtgggaaaacagatggccctgatggtgcaggagaggtttgggagaagtttgttggaacttggaggaaacagtaccattattgcctttgaagatgcagacctcagcttagttgttccatcagctctcttcactgctgtgggaatagctggccagargtgtaccactgcgaggcgactgtttgtacatgaaagcatccatcatgaggttgtaaacagacttaaaaaggcctacgcacagatccgagttgggaacccatgggaccctaatgttctctatgggccactccacaccaagcaggcagtgagcatgtttcttggagcagcggaagaagcaaagaaagaaggtagcacagtggtctatgggggcaaggttatggatcgccctggaaattatgtagaaccgacaattgtgacaggtcttgcccacgatgcatccattgcacacacagagacttttgctccgattctgtatgtctttaaattcaagaatgaagaagaggtctttgcatggaatactgaagtaaaacagagactttcaagtagcaactttaccaaagatctgggcagaatctttcgctggcttggacctaaaggatcagactgtggcactgtaaatgtcaacattccaacaagtggggctgagattggaggtgcctttgkaggagaaaagcacactggtggtggcagggaatctggcagtgatgcctggaaacagtacatgagaaggtctacttgtactatcaactacagtaaagactttcctctggcccaaggaatcaagtttcagtaaaggtgttttagatgaacatcccttaatttgaggtgttcggcagctgtttttgaagaagacaaagaarattaaagttttccttgaataaatgcattattatgactgtgacagtgactaatccccctatgaccccaaagccctgattaaatcaaaagactccttttttaaaaatcaaaataaaattgttacaacattaaaaaaaaaaaaaaccatttaccacttagcaacattggcagctttagttctccagcagcctacatacattttgtgctaaggagcaaagtaatcttccatttaccaagagctttttttgctttttaatgatgtattaaattaaacacccactcaccaaatatctgtgagtgttggttgcgcagatggatttgagtgtttggtgctggggtgcatcttgtcacagctgatcacttactggttctctgactgtggctgggtggagttggcatctgtctcctaggttcctcctgcccccaacagtttgtggttatggtgataaaattattgtgtgayaaatatcatggcagacatataaacagaggaaaggggacagcaattgaaagagtatcaaacacactttaaggttctaactgtttcagttaccaaggctcaggaaggcgtatgttgtgtgttaagggatccagagtcactcagacagtgttcctctccctctagcagggtatgaaactactaatggccccagaccctcatcatcactgtgaaattcactgtaaaatctttggaattttgatgagtcaaaagtggaatctggttattttgatttgcatttttggattgccagagaggctgagcattgctgcctggttttacagcccatttgtgtatttgttttgagcattgcttgtccttttcttgaccctttttaattgggatgttcgcctgttttattattgtcttagtagagrttcaaaaaactctaataaggatgccaatccctttactatcatatattactaatattttttctcagttttgtatttaaatatttattatgctttttaatatgtttttcttactaaaaacctaacaatcttttcttggtttatgtctttgatgttatttttaacaaaaggcttccgggcccttgaatgctggaaatgttcacttaaattgtttttcaatattctcatgggattttttttctcatttaaaattttaatctatctggaagtaatttgggtatatgtcatgatgcatagagctgacttaatttttctccatatagttaaccagttatctcaatattattattgaattatccattactttctcactgatataaaatgacatttttattacataataaatcacatatatcgctttatatatatgtatagatatgtgtaaaattgggtcagttctagattttatctttttgttgatctctctgctggaagcatactattttgatagttgtatctttgaagtattattgtcacaactggcagagcaaaatacttgtaactcttcacagttttattagccagtggctggaatttattcctctatatggatttgagaatcatttcacaagtttaaaaagttgtgccagtgtatttatagcaattagtatataggttaatttgagagagacttagcatttttttagtactggttttccacccaggaaaacagcatctcattccatttatttcagtcatattttctgacactcagatagtctgagtgtgcgatatgatgtgttaaggcacaggttctggagtcagagagtctcagttcaaatccaagtctagccatttattagcttgtatatcagtgaaaggttttccccagtgagtgggacatagtgttgctcagtaaacatttgttgaagaaatgtttgaatgaaataatttattcctaaattttttgtttttgcagttgtgaatgagttttagtctgcatgcttgccagcaattaacattgtcagttttttagattttagcccttctactaggtgtgttttaattagtaattccctggtgacaaatgatggcaagcatcttctttggtgaggtgtctgttcagatcttttgtccatttgttaattgggtgtttgttttcttaatgttgagttttcaatgttctttgtgtatgttggatataagtccggtatcacatttatgtttgaaaatattctctcctcatatgtggtttgtgtttttattcttcccacagcttattttgaaagcagaagtttttaatgttaatataatccaatttactatttttttctttcatggatcctgctctgtagtataattttaagccccttatatcaactcataaaaacagacagggcaataatgtaaattgacagagcacacagtccataagcagcatctttcataaaactaaggattagagtatatgtctataaactaaaaaatatgagcagttagggccaaaccactgaccgtaacaaggaagtctgcaggaggaagcagctggcagacaaacagacttctggggatcccagggctggggacccagaaacttctctcaacacttgtcccaagaaggggacagtcccccaggagtggagggcttgctgttgatgtgaacacattcgcttaaagtggagggggcttcccaggctccagttggcaaacagtaaggacaaatgagaaaagtatgcccacaaagcagaagagaaactgcaacctaatatttcaaatgagctaaaagaaattaagaaaatgattaaaagttacaaaagaacaggacgaatgcaaattaaaaaaaacacaggttacatcattagacaacagaaaaatatgaaagggaattgattactcagaaaagaaatagaaataaaagcaaaaaaaaatctaggaaaggaaggtcgaactggaagaaatataagagtgaataaacagtgcagaaagcactgtatagaaattggaaaggaagaagaaaaacacagaaataaagaagacaagaaactatttgagaagtgatagaatgcaagacaggcaaaggagctccacaaatatatgatgattcattatataatatatatatgatatatataatatatattatatctatctagataggtccacatatataatacatatacatatataactcctctatataataggagcctctgaagagaaaaaaccaaaccccgttgtgtactgggaaaatcaatccaaaaggacaacatcaatgcatattctagtaacataattgcactataaaggaaaaaagtcttttggggcatctaggcaaaaagaccaagtcgtttataaggaaaagaaatcagattggcatcagaacctgagagcaatgctttaagccaggaaatactggagaagatatgttaaagataatctagaaaagaaaaagtgagccaattattctacattcagccaaactggaccctcaaatataagaaccacagacaaaactgtgcgaacatgccagacctyggggaatgaatttcccattaacccttcttgaggaaccttctgacaattactgtgactggagaaactttagcataaggactggtggttgacacgtgagactttggggtacgttagcttctggtgagacccctggctttctcagaattccataagtgttcttgatccaaagacagctgtaaaaagtggttctatgatcccttggttggaataccatttctcctctgctcaggtgttggctttgactccagtcatttggcttgtgattatttcatatccctccttttaagaagccacacaccaatgcacctgtagcttgtgtggccaattgcccacccaaaggatacatatcatcagatctctctaatatcaacaaggggaagtcatttgtttccattgagattctttctgtttaaacacaggagagctcattcaaccttatttaataaggagaaaaaagscaattaattggctcacctaactgaaaaatccagagttagatatggctttgggcaagtcttgatctggtaatttggaagtgttacaaaggatcttgtttctttccatttctccactctgctttccatggtgttgctttcrttctcacatggtgtcaagatgttacgagaaacaacctcactacacatttctttttgataaacagtgagaatatttattaaaagtagaatagctttttcccagcattgctagcaaaatcctgggataaactgagtggactagcccaagtcaaatgactacccctaaccaattgctgtagcagtccaagtcacgtgactactcctaaccaattgctatagccaggaaaatgaaatgcttagttatggttacctgtcctcctcttcttcctcctcctcctcttcttcatcatcttcttcttttttcttctttttttcttctttctctccctccttttcctcctcatcttccttctcttcgttttcctcttcttctttctctccttctccttcttcttctttcttctttcttcttcttgtttcactctgtcacccaggctggagtgcagtggtataaacatggctcactgcagcctcaacttcctgggctcaagcaattctcccacctcagcctcctgagtagctgggactacagatatacaccaccgtgcctggctaatcttttttacttttggtagaaatagtgtctcaccatgttacctaggctggtcttgaactcttggctccccaaaagctgggattataagtgtgagccaccgctcccagcccacatgtctttagaaccaaacagagatttccaaacagaagtcagtgactcctggaaggagaaaggaaggaatggactggggaggctatctaaaaaagaatttttaaacgtgttgaattttatcaaagtgctatcttgacatttcttgagatgatcatatattgactcttattgattgtggtgagttatgtaaatagatactctaagttagggaaggcaacctacttagctgtgctctgtgggagtaactgaggttctgggagaatctgcttgtttccccttttcttctctttttccttcttccagctcttatgtgtacttctctgcctctcctcaaccctctgatactggtgttctccagagttctgtctttggtcttctgytgtgagtgatggcaaggttttaactgcctttcctgtatgctggtgtcactctccctgagcttcatacttacatatcccagagcctgactttgcattttgaaaggactagagacatctcaaactcagtacaaaggcaggggcctttgtactgtgtcatctcatggagaaggtagaaagggcaagtgagtgtgggagacagaacaaagaaagcaagcggaattcatccttttatcaagagccctctcctgtgataactaacccactctcaagataacagcattaatccattcctgagggcagagccccatgacctaatcacgtcttaaagatcccacctcttaatatagtcaaaatggcgactraatttcaacatgaattttggaggggaaattcaaatcatagcacccctcaccactrctcctagtgtagacactcatcatcttttgtcaacaccagtagttcccaaactttagcaagcatcacattcatctggaaggccagtcattacacactgggcccacccctagagtttctgattcaatagatctcggatggggcctgaatgtttccccttctaataagttccatgtgatgctgatgctgctggttcagggaccacaccttgagaaccacggggatcattgcaggaactcctttctgatctctgttcctcccttagtctatgcacatttcaaccagagtgatccagccaactacaatccagctatgctacacctttgtccacctagcaaagcccaggcttctcaccacagmagccttctgtgacctggctccttcctccctctctagccacatggtctgttccacattgcctgggactgttcacacaaactctgttctttgccatccttgtgccattccatctgccaaaaatgctccttccatcggtcttcacttggctcattctcactgatccttcaacattgatctccagtgtggtttcctggaaatttgcctgaatccccagattgagctaagttgcccttaggtttctctggcttcatggtcatctcactcccactctgctccccactcctgtcttcagactgtgggctttttgaaggcgtgaacactcagtcttgcttatcttttttggcttattttctgtgtagtatctggcacataatagatgcttgatgaaagtttgtggatctaaactaaatattggtgctactcttgagtataactatctcccctcaggggccctgccacccatatgctagtacctgcctcccatcataaggaaacagtgccttttaggcattgctgaaaagtakagggtctggacctcctgatactgggacttgttaccctttagacatcatttcaatcttcatatatcttcctcctgtggttagacttaaattgagggctgtgggctcagccacagaacatcatggcctctgttaccctaagtttcttcctgttcttgaaattgtgacggtttggaaagagatggggagratattgttacccacgtgacaggctgcagcaaccttgaccactaaggtcaaataagcagcattgatgaattttagcatgtgggcacccctggagggggcgaggcaagtctttctgttacaaagatgcagatttcagtgcaactgaaggcagaactttctaatgagagtataaagttgtccactggttgtttagaaagaggctggacttacaccagtagaactccaagtccacatagacccgccatttggttcaccagacaccattcccagggctgtattttagccrtctgactgtccagggatccccgggaatccttatgtgtgatgatggggctttagagactttgaactaaaatgccaaggcctcagctccgtgaattggtcttcttcctttagattggtgcttctcaaacctcttcaaatctgagggtgaagaaagtggatgcctacctccaccaggtaaagtgatctgctgcaagcattagatttttgtgaaatttcattctttagcttaaaaattcatgtgaactttgcattatactctggttttctcaactaagataaaaatattttgaaggactttgtagttaaatcactaaacttgtttcatcttgacataaaaatggatgctccactaggatgcacttgtagctttgtatgtctcctggccctatctctgcaccatcaccatttctaaagcattgcctgtcttacacaaaggccccaaggcccrtaagaaatagtaatgattttaaacaggattccaggagagtggagcccatgaatctgcattgttgcttacagaattacagcaagattgggaacatgagagttgtttttttgtttgtttgtttgtttgtttgttttattttattattattattatactttaagttttagggtacatgtgcacaatgtgcaggtttgttacatacgtatacatgtgccatgttggtgtgctgcacccattaactcgtcatttagcattaggtatatctcctaatgctatccctcccccctccccccaccccacaacagtccccggagtgtgatgttccccttcctgtgtccatgtgttcttgttgttcagttcccacctatgagtgagaacatgcggtatttggttttttgtccttgcgatagtttgctgagaatgatggtttccagtttcatccatgtccctacaaaggacatgaactcttcattttttatggctgcatagtattccatggtgtatatatgccacattttcttaatccagtctatcgttgttggacatttgggttggttccaagtctttgctattgtgaatagtgccacaataaacatacgtgtgcatgtgtctttacagcagcatgatttacaatcctttgggtatatacccagtaatggggtggctgggtcaaatggtatttctagttctagatccctgaggaatcgccacactgacttccacaatggttgaactagtttacagtcccaccaacagtgtaaaagtggaacatgagagttgtaactgaaaagcttgtgaggcagtcttctaagatcaggggctcccatgtatgcagtggagtaggccagaattgctcccagtgcctgatcaaagacacatgaagccatgttctgtgatgctagaccgtggtcagagaaccctggtgctgggcatagagtacccagtgttctgcagtgtaggcattttaatgccttgagcactgaaggtgagaacctgaggctcatcaaaatgagcaagtaggcagagctttagagttttagagcaagaatacaagggagccccttgttctcattcctctcttagacgagaatacgttactcagcctgttctgtagccaagagaagaggatgatgtcagtggatccaagatagcctgtgagtttgaaccgttttttaaaagaaatatactttgattgaacacaaaatggtcttttaggacttacttaaccctttgctgtgctttgggcattttctgttttctattccaccaatggacacagaactgtacccctttcatactctctagggtttggggagatgggagggggaattaccatgggagcccatcttcagcttagtcacctgcctgtaaacagactgcttcctttcattgctgctgcggtgcttacctctctaaatcttcaaaaataatacaaggaagaaatatagttccttgggtgttgcctcgttggcttttgatgtaaaacatagtggccccagagggtcaaggtgcagtggggattgtcttccatgtgtgttagcaaagaggaggggccaagggctgggcctaaggccttggggaccttcccaggagaagctttgccggtctcaggcttctggtgtctttgctaagcttctgaaaatgttgaggttttaattgtgtagtgtttcactcaggttgtatgtcattaggatgttaatggtgctttttatcaataactgcttggaaatcatgattgttcttgccacataagtgaaattccttttcaaaaaagtgggcatttgcattttgtggctgactttgcatgggctacttacttttaaatgggattcatttcagtgagattggtttttaaatgggaattagtgcccgacaaggattcattacccctggggccatctaatctttggacttggtgactgaaggtcatggttcatcccagcatgagtggtcctgacacaccagagtcgggaaagtgagtgtggttggattcttgatggggtaccagctgtggctaaaaatccaggtgcttcagggtcacaggtccctaatgggagattcccatggagacaagcagggaagacatttcactcttggtcctctaaggcagttctagcttatcaatgataaaattgaggacagaggcagcatgtataattgaaatccacaggaaatctctaaaactcatttttagcaggtggtttctgtttctttgcccatcaaatctatttaccagaactgctgaccatgtagcaaaatttactgatttgaatatcatccctccccactttctcccaacttcatgtaatgttcaggagaagggaaggcatcagaggcatgcaggaggatggaggtggatcagaaatgagtgcttgggtttttccacagtctggataattgcctcctgaataatcagagctagactgttctttgcttgttctctattacacaatgtaattttacatgcttgaagtcatccggcagtgtctattatcagtgrtatctctaataaaaggaaggaagtcagttgagggatgtcacgttttgaccattgcctttaaattcctgtgttctcccagtcagaccctgcatgatctttgggatcttggaatggagctgtgtttacacacactcagcctagtcatttgtggctgaattattacattatgaaagcttgatgccttgattcctgcactgcatgtacgacagaaagaattttgacataatcatagcatcgaactgcagtttggggttttttttgttttgttttgttttgttttcctcctctgaagttaaatctctctaaggcttccttgtgctggcctcctttgggtacttgtcattttgtggattatattctagaccatttttttctttccattttaatgcataatcracatcaggctgagtttttttctcatgactrtagatgacatgactatgttgtataaataatttctctttaatctgatatttgtcagggggaaatggcttctccattatactgtgccagccaagttttctgtgtttagatctgatggcatctgcatgacttctgtgtttatttttctcattacgacttcagagttagcaagacgatggcctctttatcttttctcactgccatattttccaggcacagtgggatgtagcatcccccctccactggcacagcaaagctctctgagtctagtagtagcacttcttaagaaagaccagtgacagtggggaaggaaggagagggcatgggtagggggcagtgtaagatgctgtgctggaaagcacatcactgtgtctagtgcatggggggaggttgacggtactgcctccytctttgcagcctgacctcactgtctgggtggcccactgcagcgggagcgggtgccttgtgccaaacgttgtgcacaccgacttccctacctgcttcctctttccatgctcattgtttctcagccagatctttcacatcttatttataagtcatttaaaaaccctcacctcatttaaagtctctttgtacaccatcttaaggcctttctggaacagtctgagatataagtaaatacacaaataagagcatggccttcccagtgaggcagacctgggcttaaatctcagcttcatcctctcgggtaagtggcttaacctttctgcagcataacctcttaagccatagaaaggggcccaggatgccctgtgggattgctgtgacctttacgtgagatgatgtacgtggggaattcatcagccccttttgtcttattgaggcacagtgcagttactcatcttgagcaaggtcccctgagtcccagcccaattttctagaattttattttaccaagtttcagagaaaccccatctatattctgaggaattttaaatacaacaccttattctaccaaataaagactttactggaaaaataaaaagcatgtgtagaatatttatgtagtggctaatgctccattaatgttaacaccaaaataggaaatagactttcccaataaaattaaacctaatttccatttatttggaaatatctacatatacaagaagatagwaagtttaattcagtaaacacccatgtactcactatttactgcttaaaaaaataggtcatacgctgagtgtggtgcctcatgcctgtaatcccagcacttcgggaggccaaggtggatggattgcctgagctcaggaattcaagaccagcctgggcaacacggtgaaaccccgtctctactaaaatacaaaaaattagcagggcgtagagaatttttgtgttccctactaaaatacaaaaaattagcctgtaatcccagctacttgggaggctgagacaaaagaatcacttgaacctgggaggtggaggttgcagtgagccgagatcactccactgcattctagcctgggcaacagagcaagactccatctcaaaataaataaataaataaataaataaataggtcattcacaatatagttgaagccccggcacttctctccctgaattcatcgtcccctccaccagcaggaccacttgcctcaattgggagtttgtcagcatttctttgtactgttataatatattcctaaagtctattcagtattgttttaagtatttgtaaacttcaagtggtatcctaaggtatgcatcattctaaaacttgcaattttttgttttgttgtttaactcaatgtttgtaagattcatacgttttaaatgagtaactctagttgtttcatttttactgttgtataatattctattgtatggctagtccttgatacatatatcagtttcttctggtgatattaatagactatggattcagttttctaaatttttgttacaaacaatactgctctgaatattcttgtaaatgcctcctatacaccctagagatacactcatataggaggctgaattgtcagatatatacttcttcgtcttcactagatatccccaaactgtttttcaaagttgctaaaccagtttacatgcccaccaacaatgtataagagtttctgaggggccactttcttgcctatgctagataatgtttgactcttaattctgccattctgttgataaaaatagttggatgtaggatagtatctcattgtaatttaaaatttttatcttcctgattactaatgatgatgagcatctcttcatacttatatttcctctcctgtaaatttctttttcaaatcatttccccggctttgtttttggctgtcttcttactgatgtttaaaaaaattttgttttatgttctggttactagtatttttgggtttttatgttttagatttcatctctccagctctgggcctttttctcttttattacagtgctctttgcttttttttgttttgtttttggtgaatagaagctataattttaaagtcaaagtgattaatcttttatttcatggttgtatattttgatgagtagacatttgtatgtttatgtgataaaacatcatgctgccaaattaatgtactattctaaatagtagggcataaaacataaaagtaatgaaatatgtcactggctgtgagtatcttgtaaccatgagtaatcgtccatctatattatataacagaaaaactatgaaagagatttttgattgattttgattgtaacgtagggatattgtttgggggggataattcaccaaatataaaagactttatcttcctcatgccaacattataatcttgtgtttttcrtggagctatctggaaaaaaccagtggaggtatctggaaatgaacacagatagctgtcaatgtctgggtccaggcatgatagctgagtcttgggtgggtgttgttaccttccacgaggtaagtgttccaccggtgtttgttgagtaaatggatatgtaatagagtctgcaggaggggccattaaagaagcaggaattgaagttagcaacagacaagtctgctcaaaagaatagactagtggttctcaaccctggctaaacccaaggagataaaaagttgaagacacttgggccccattcttagagattttagagattccagttatcttggtgtcaaataggacccaggcattgatatatttttaaagttccccaggtacttctaatatgaagcccaggttgagaacttctagaccagaggattggaagcaggaaggagaagggaagctcatgggctgcccagtgagctcttgggccctgaaaggtccagggtgtcagagttgccaggaggtgctggagggcagccagaccacagccaggtaaggctggaggctggagtgagggcagcgccagccagcagggcccacaactgagaggggacagaaggaagagagtgttctgggtgtgctaagcacagttggcaggggagagagggtgggatgggacagagtttcccagcatagagcagggaggcccagcctcacagtgggatcacctagaggctgcagggccagtccctttctgactggaagccagaggacagacaggggcccattaaaaaggcaaaaggcagacacaacctttgtttacccagagctcagacgaataaagaactaagtttggcctgagaatggagggtggacagggcacatattgagatcattaaatgctatttttaaatcagagccaacagggcagcagacagagttgatgaagagcatttaaaagtgcctatttctgtgcccacagctggtgtcttttcagtgtgaaatgatcttcaccgtggacccgtcacaaagtgcaagtcaagcttgccttaagctgtgtgtgtgcgaacactcagtactgtagatggtgggaaggaagggattctaaaggagaagtcattgaagtggggaagattcagactctgagttttggaactcagacattccacccccacctggacacacacgcacatgcacacgcatgcataccctttttcttcttggtgctgggccagccctgttaacagactaccaggcacaagcagggatcgccaggcactgcatcatctgttttgcagagtctgaatggagtccagaagccataccagaaagatgagtgctgcagaattaatgcttccaattttggagcataatggaagagcagtgcactgggagttaggaagaatgaagtctcaatcttcactctgttacttaaaagctgtctgttcttttcagtttaattcaattccacaaagcatttactgagcatcttgtagatgctggggataaaattgtgaaaaagacagagactatgtcctcaagaaactcacagtcttgccaaggagtgagatatttaaatgagtaacaaaatcagtgctatgaatacaggagtactgaggagagaaatcactggttcttctttgggtgaagttggacttgaaccattgtcagagggcaagggcgttggagcaggcccttgaaggatgcgttagctgctgaggcaggaaagggctttccaggtcarctgctttccttcctgaatccttagcttccctcttgtctgaggaaggctctaaaactcgatgccaagttacttaacaaaattcctgaagctgaaactattaagagctgcagcaatcacctctagagaatgtggtggcgtgacaggtgaattaaccaacctgaactaccttgatttctctcgtgagtttgcctcttccatctgcctaccctgcaccagctgggttgtatcgtggagttycctttctattgaagtgaagccaagctgagtttttttcttgatcattgcagtgtattttcccacttgctttcattgctgtagttcctactcatagtggtgtttttgtttagtttttgctaaatctctgttcttggttgttcagaaagtgggcaagccaatgtttgattttcccaagtcacagatcttattacgttaatcctttgctcaaacacctgcaatgtgattggtgcttagagattaaaaaagagagctccttcctgtgtcctctgaggatctgaccccagccttcccagtcgaccctttctcacactgcaatccagctctctggacacttgttttctccccaccagcaccttcgctttcctgcctccatgcctgtgcctgtgctgttccctatgcctagaatctccttccccaacccagtatcttcgtccccctattcttcaccacctgcctgccttcatgaagccttccttgatctccccacctcccaaaccagaagtattacctcctctttctcaacttcaaagtgggagagaaaatgtctctcaaccagaattctatattcagccaaacttcaagcaaaagtgagtgatagacgtttacagatcaacaaagactgagtgactttgccatagaccttctctgaatgaaatgatgtattcctaattttgcagtcatggacccatgttgccagcttgagatcaacaatggtatttataccacggaagtcaacaaatgctacaaaatagtacttgtgttttttttttcatgtgaaagtggattggtgaccctgcttccatgtatatatgtgtgtatgttaccattcacacatgtacacacaaatatttgacacactacgaatgttatacagcacagttaaaactacgctgtagttcagcagtccttcctcattaggctactgtggaaacacatgtggctaggaagtgtgtctctcttcacactctggtcccaccctcccctcttctcaggtgttggaattatgttacctatgcccccacccctgcatttgtttctctgaccctggcaaacttggccacttcctggaatcagagctaatacactaattgaagagtctgtgcatctgcagttgctcaaagttcattctttgaagtagagaatcttggcctggctacacagatgtcagtaaattatctcctgtttctgttcatagttgctgttttataaattggtgaaatgcaggcagttagacgcctgtgtcagaagcagaactctgcaaactgccgtctgtgaatacacctgctacaggttttttcctgctggtcactacctagtgccagccctcagagtcagcaagaacaagttccagtgttcttttgggacagttgacctcttttggacacagaagccaaggccagatgacttggagcacagaccaagaaggaaaaggcaggccaagagacacaaagcaaagtgtgggtcaggactagaggagctggtraactgaggcacccacgccggtagtgcaggtagagtgacaacacgtgggagggagcacagtgaagtgaggctgggaggagagaggcaaaggatgcaaaggatggtagagatacgagaggcaggggtttggagaatgtcccttagcagcaactttacagccccacttccgggctctgctgtcctcccacgagctcacagcatgccttcctgctgggtaggtcagacaggagttagaatactggatggcaggcagagaactgttgtggctatgagagaaagttgtagggtctttcctgcctttaggaagaaaaatgatatatcttctagcttgaaagttgcttttaaaactccatgctgtgacacagtggccattgcctgtctgcccctaggattacaggtgtgaatgcgcctggcacaatgcctgggtcagagggacttaaggaatgttcacagtcatcagatattctcctggtagagtcaaaagtcgcctgcccttccccgccagcccaccatgtaaggttagctgtatcaacacttcatgcacatattgattatttggaaaagtatacaggcaactgggcacaatggctcatgcctgtaatcccagcactttaggaggccgaggcgggcagatcacccgaggtcaggagtttgaaaccaccctggccaacatggcgaaaccccatctctactaaaaatacaaaaattagctgtaagtggtggtgggtgcctgtaatcccagccacttgggaggctgaggcaggaaaatcacttgaacccaggagatggaggttgtagtgagccaagaaggcaccactgcactccagcctgggcgacagagtgaaactctgtcagaaagaaagaaagaaagaaaaagaaagaaaggaaggaagggagggagggaggggagggaggggtggggaggggaaggagaggaaagagagagaaagaaagagagaaagaaaagtatacaggcaaggtattggttaggggtgaattattattttttggacagcctgtgcccttcttgcaggaatccttccctatctcttggccttccaatgcgagtcactttttattttattccttttaagcttctatttatgatttcattcattgctttattttctgccactgagtgactcttttaggagcctaattttgctggagaaatcattcacaggtggtcttgttggagggggcttttgtgtgtggtggaggcagtgaactcgagagatcacagggcaagcgaaaaggtaccctggcttatcaaatttatcttagtatatactaaattggtttcactttttttttttcagagtctcactctgctgcccaggctgaagtgtagtggtgtgatcttggctcactgcagcctccacctcccgagttcaagccattctcctgcctcagcctcccaagtatctgggattacaggcacccaacaccatgcctggctaatttttgtattttgagtagaaatggggtttcaccatgttggccaggctggtctcaaactcctggcctcaagtgatccacctgcctcggcctccgaaaatgctgggattacaggcatgagccaccatgcccaactggtttccctttttaatcattaaccttttttttttttttttttttttttgagatggagtttcgctcttgttgcccaggctggagcgcaatggcacggtttcggcttactgcaacctctgcctcccaggttcaagcgattctcctgcctcagcctcccaagcagctgggattacaggcgcccgccaccatgcccagctaattttttgtatttttagtagagatggggtttcaccatgttggctaggctggttttgaactcctgacttcaggtgatctgcccacctcggcctcccaaagtgctgggattacaggcgagagccaccgcatctggcccaatcattaactttttaatcagcgttctggcagttgcactgctttggaaagagggtgtctatttcaataacaaaaactggcttgggagtggagctgggtgaagggctggcagcccagtgacgcagcaggttctggtgctggtcctctcccagtagagttgctcttggggctgtgcccctaggctactggtgtcagcacccacaccttgcaggatactgacttacttagacaaaagaagagtaagagaagtccacactcaacatgagcctgtcactttgacctgaacacagcagtgaaacactgaaggaacttgttcacaggctcagggactcaaagcctccagttggttttcattgtgccaggcctgctgagtggacccatggttgaggaggctgcctccccaagaggagcagaacaggcatccttgccctcctgagaaccccccacagagggccaggaacctcagatgagcagtcattagagggctctttgagttttctgctggctggtttggtgagaggcccaagcgccctgcatgagttctttacactgctgtgttggggtggggtrggagaatcaggcctacagaggagaagaagactggtgctttggagagtgttcatagcaccagcactaagagttaagcttggggaaaggagaagaaaggagaaagggaaattattatggtcttgcaaagtataatgtaaagaaagtttgcttttcttgtttgttttttgtaactgaaaaggctcccatggcccttgggtcactgcaagtgtctctggttgtgtaaatgctgctgcgtgctgaaggcgctccttcagactgacaaggggccagtacagagtgtggaatgcaggataagcttccaatagtgacaaatgacyacagtctcttagagaaaaacaaaattggatccatggaggtgaggtcaagaccgtcaaccaaattagtctagagaatagtcacttttagaaatctcagtaaagtaattaaaaataaagacaaatatttgctttatgcttgctaccatctaactgcttgccaaaggcagccagatggtgttggccagtgaacactgaagagccctatgctcactcctggagttgtggggcagagacaagcctctcgtggtcatcatggtgtggtgttgctcagtttatttgtggaactacaactaagatgaataatttatccatggtaaatgtgagtaagactaagctgtttgaccctcatagtaaaacatgaagataagaaaaacaagatctaaatataggaaaggctcttaaaccatacatgtgatttagcctcaagatttgagagaaatgtttattctcttttgaaatttcagaataataatggcctcagcatgatgcccagcacatagtaggtgctcaataaataattattgaattgaattcttttcttccataaaatagtacatgcttattataaaaatccagacacttctagtaaaaatgactcaaagtccaaccacttagcatttggggatgtatccttaaagacatttccaatgcatataaatggatactttttttttaatacaaaaacaggactgtgctatacatatacatcatgcttggtaacccatctccagttcagtaagctggattcttcaatttagtgcacacggtggcataatgcaatgcgttgcgtaaggaaggatgtatccatttgtgtagtttaagacttgacgcttctcttgtgctgtcctttatttagcaggtgtcttctgcggaggtgcgcatcgggcccatgagactgacgcaggaccctattcaggtacgcctcctttactcagccctgtgactcagattattttcttttttttttcttttttttttttttttgagatggagcctccttctgttgcccaggctggagtgtagaggctcagtctcggctcactgcaacctctgcctcctgggttcaagcgattctcccacctcagctacccaagtagctgggattacaggtgtgcgccaccatgcctggctaatttttgtatttttaatagtgatggggtttcaccatgttggccagactggtctcaaactcctgacctcaggtgacctgcctgcctcggcctcccagagtgctgggattacaggcgtgaaccactgtgcccggcctggctcaaattgttttcttgaagacctaaacatttccccattttgagtataaatatgatggacagattgcatggtggattgtgagaaagaacagctcttccaccccaaaactagtctgctccacatcctactgtagccagaaagggaagaagcaatgaaatggtgaagggctgggctttgccatgagtcacaactgggtgggaatcttggctctgcctttaatcagctgtgtgaccttgcatatattgcttcactcctctgacccagtgtcctgtctgcaaaatggagatgattatgcctcgggaaattgtaagttaaatgagatagcataggatgcctagaactttctctggcagttaccattaatgatagcagttgctgttgtgtgggaatagaagatgataaaatgctcccctacatcttctatgtgacttaagccaagcagcctactgggctctgtaacacagcaggaacttgtgtccaaggatacaaggcccaaccacctgtaggactgacttcactctaataatggcagcaactatgtcctccttgcagcccttccaggttccygtgcccccttaagagaaacatgtatgaagagggagtttgtacccttttaaataatttctaaatccttatctgcatataagccatcctgttaggcctaaataagttaacttcttccttgtaaaaactgtagcttattagcacctggaatcttgccctgtacttgggacaagtaaagatgcagaaaagatgtaaacaagtcaaccaacatatagatgaaagtgaaaaaccaagcaaggaaatgtgctatttgatttatgagcaaatggaaaaagaaaatagtgttttatagttgcttggaaaaagaaatgcaaatctaggaarggaaaaaaaaaaaggaagagattagcttgggaaaatttgatgaaaacaaatttaggaacagagagagagagaaaaataaacaccagccacaactatttgtatagaatacaaacaaatggaaaatttcagtaatcattctgagccatgccctttgtactccaattttgaataaaggcaataacaaataaaggcattgatatcaaggacttattcccaaagcaatttccagaatactttttgggattagtgtggttttagatcaatttcatttaccttcatttttgtcctatgctacactggcaattaatgctcataaggatgtctcattcttttaaaaatgtaagttgtcaaatgttaaaatatttcaaatattcataaaggtgcatgtgtgtaccaacacccacttctatcaaatattaatgatatgtcttatttgtttcagagttttctcagaaacaaaagattgtggatactgtttaagccctttatttatccctttgctacccctttctttcctctctgaaagcaaccactatgatacatatttgtatactcactcttcgtatgtatgtgtccattcataatatgtacacttgttttgaatactttttagctctctttgaaaggtgttgtgctatacacatcgttcttcattcatcagttggtgtcatatctaagaattcattgcctaatctaaggttgtaaacatttacttctttgttttcttctaagagttttatagttttagatcttacatttagctctatgatccattttgggttaatttttgtttatggtgtgaggtaggggctttatttttatctagttgtcttagcagcatttgttaaaaaatactcttctccattgaattgtcttggcatctttgtcgaaaatcagtcataaatgtgaggatttacttttggactctcagttctattccattgatttatatgtctgtccttatccagtaccacactgtctcgattagtgtaattttgtagtaagttttgaagttgtgaagtgtaagtcctccaacttagtctcatttttcaagattattttggctttctgtgtcccttgcatctttgtatgaattttaggaccattttgtcaatttctgtgggggcttcggggagctagctgggattttgatagggattgcaatgaatctatagaccaatttcaggagtattactatgttaacaattttgttttccagtctatgaccatgaaatatctttctattttgcaggatcttgtatcctgcaagcttgctgaactcatgtattagttttttgtgaatatagaaattcctataatcctaagcattatgtattataggattaaattccttaggattttctatgtacaagatcatggcccagtctagatgcttttttttcttctcttgccgaattgccctagctaaaacctccagaacaatggtgtgtttagctttttaagatacttctagacctttcctcaaagtacaattttacactcttaccagcaatatgagatttctggttactctaaatccttgataatatttgatgttgtgagtcttttaaattttagctattctggtggatgagtagtattatcatgatttaaatttgcatttctccatgactaatgatgagcacttttttatttgtttattggccattcctctattttcttttgtgaagcgtttggtcaagtcttctcctcattttttaattgggttaatttttaaaagttattgagttgtatgagttctttatatattcttgttatgactcctttgtcagattctgagaacattttctctcaatccgtggctcttttattcattttcataactctggcttttgaacaataatttttcattttgaagaaatctttcactttttaaaaatggttattgctttctgtgctttaaaaatctttactcccaggtcaagaagataatttgttgttttcttctagagactttattgttttaacttttaattttagatctgtaatctacctcaagttagtttttgtgtgcagtgtgatatgggtgtcaaggctgatccccccaccccaccatattaatgtctgattgtttccagctccacttattacaaagactattcttccccattgaattgctttgaggcctttgctactgattttttttatatttgttgcagcttgtttggtggccaggtatgtagtcagtttttagattaatactccacaaaaagtgataaaaagatgtattctctatttgttggacagagggtcctatttacatgaattacttcaatttcattaatcgtgctattcaaaccatctctattaatttttgacttaaattttgtgactatgtgatctatcagtttctaattacagtggatttgttgaaatcatcaatatgtgttaatacttgctggtattttgagtctgtgttgttaggtgtatccaagttcttgattattgtatattcttgatgactgtcccttttatcattacgtagtgtcctactttaaccttttcccttatattctgttttatttgttggtaatattgccaggccagctgcctttctttaacattttcctagttatctttttctgtttttttctttcagaaacaaaagattgcagatactttataactttattttgagtagcctcttttaagcagcatattggggtttttttttcaataaaaatatgggaaataaaatctgtttctataatctttgtcttttaataggtgagttaaatctgattacattgagtgtgaatactgatatagttttattttgtattttctatttattaatcttttccttttttattgtttcttgtttctgcttattatcaagttgggaatgtttttgaagttacattttcttttctctaatataggtatacttctrttcttttagtggttaccctgaaattattattactattattattgagacaaagtcttgttctgtcacccaggctggagtgcagtggcacgatctcggctcactgcaaactctgcctcctgggttcaagcgattcttctgcctcagcctcccaagtacctgggactacaggtgcatgccacccagcctggctaatttttgtattttcagtagagatggggtttcaccatattggccaggctggtctcgaacttctgacctcgtgatttgcctaccttggcctcccaaagtgctgggattacaggggtgagccaccgtgcccggcctgaaattatttttaatatgcttgcttagcagtcaaattttataacaaaatctcaccatactatctttctgtcttctcaaacatgatacagtcctttgcagaatttaagtacctcctgacagccccactctcccacaactgaaaaacacttgtctataaatttgaatgtattatatgtggcatattaaaacatacaaaaatatttttgatatgtgctcataacctatgaaacataataacaaattgaatatcataaactcataagcctgccacccagtgcaagacctggaacattaccagtgctacggtataccccattgatttccctcatgtgagtttggctccaaataacagcagatgcaagtggtaaagagtacctctttgagtgaaggacacaataattaagggtttcttttaaaaaagataataagctcaacttagaaccaaggatggcttcacatggtctcattcaaacatagagtttgactcaatgattcatgcaataagaatctactgagtacctcctatgttcagggctctatgctaagtgttgcargggagagagagaaggcaccatgttccctgaccacagagagaggtctggaaggtcagttttattgtctataacacactaactttcagtgtattgacatctagtgtttttatgcttcttctactaacattgcaattgacttagaaaaatgaagctatgtcctaatgtttttattttacttttttttctccttgaagaaaactattctgttgcttcactgcaatgccaaaaatattaattagctacatcagccagagcccttagggcttgggaggaaatggcttgataagaatatttcaggatagagttgcttttgagggtgcatttctgagctcatcaggggaaatttactcccatgtcaggaaatgtactcccatagggctccacacaccccacacagagctggcaggagcacagttaggagtggaatggattggaagtgcagagtggtgctgtggagcacgtctctcctgggtgagttgatgtgacccacagggaaagtcatrttttccaatcttggctagaaaataaaaagcagaggaagtgttatgaggcagagattcaaatcaacatgatactgtctgaaaaatcaartggccttttcttcatccatacctggaacacgtttacttccccagtgtgcagaatgtatgtgtttctgcttagagagtcccrtccccrttcccgtcatgctgggctttccaactggacatggaaatggatccccacagctgtgacctaagctttttcttagcaaggtcacacatctcctttcaaagcctggccaagatggtgaaaccccgtctttactaaaaatacaaaaattagtcgggtgtggtggcgggcatctgtaatcccagctactctggagsctgaggcagagaattgcttgaacctgggaggtggaggttgcagtgagccaagatcgcaccattgcactccagcctgggcaacagagtgagactccatctcaaaaaaaaaaaaaaaaaaaaaaaacacaacaacaacaacaaaaaccaccttattcttccatgttgtagggcatgggttttctggaaccattatattttggggattttatatagtggagatcacatggcctcatagggagctgaccttcacacattaagtgaaatgactgagggatggagatgttcagactcagtaacttgctgtggtcagcatttcttttgctgtctgtccttactgctgctaccaggttgtgtcttctacctcgtccagccagtttcaaagaaccatagagttgttaagaattttcatctaatattataggtaaaaatatttatggtgctgagagatagtaagttacttaacatagtgattacaaaggccctggggtcaggccagcctcggttcacatcttgctggcagtgcagctatggacaagttttttaaccatctaagcctcagtttccatgtctataaaatagggataatgcccaactccaaagagtttctctaaygggttattgagtgagacagtatgtttctagtgcattcagtatagtggctgscccttaraaaaytcccattaaactatagctgtaatcagcatcactttcctagggacatttaaggaaagttctcagaccattttttttcagctcaaatgaccactcccctgatcaaattggccacttgtttagtattatgcagacasagcttatgtgatctatatatgtggtctgctttagaagctccattaccaggtgtttgcttaaagccaaaccaaatattccaaaaactggatgtttaatggtagacattgacaatccatttgaagacacatagatacaccctcatttagaaataacgctagtaataatgaacacctatattgccttattcaagatgaggaaaagttagtttttgttttcatctttttttataattagccatcaccagataaagtagtttcattctaatttagctgtcaaagacagattattgctrtcctcaaaaagatatgtttcagctttctttgaggtctttgtagttacctttgaaaagcaggtatctcttgctttgtacaggtccaatgtgcacagatttcatggtttacttagataacaccagacccccaacaacatgtttcaaattgcggttacatcagtgttttaactgtgaataaatgcataaagcataaactttgcagctggctcttcagtccacaaatcactatgtaaataacaaatgtgcagcatcatcagtaacttatcgctttttttaaccataactttttttagccaaagactggttggtttctgcctatctgttattcagcctaagtacagacagcaaagcatgtagttgtgttgcctcctatctctccgtgataaacccaaatgacattatgcaaaaatagatcattgaaagagggaatgagctaacaaagatgaaagtgcaatgaagagatgcaaaatgataatgctgtgagtgaaatttgaattgaatgtaaatggacttagaggagaaatagttgactgtggaatgccgacactgctgtctttgagagattctagacatgtagctggtagaagttagtgaatgcaagttcatcaacataaatgaggacagcggtgtggcaaaaaggatgaagatgtcatagaggaagtgaagccagcaaaaaacttcacattaatgaaaggagctctggggatattgcatgatactgaaagcacagaggataaaatgtcagcagctgatccaaagttaggagtatgacaatttgccaaggcataggaaagatgctcacttcgtatcrtaacttatacaactagaagaaggtggcaagcactgtccaaactactcttgataaatttttttaaatamataaaacatcttaattttcaatgtttctaatattttaagttacagtatattaaataaattttagctttatattttttcatttccctatatatttataaccaagaataagaaaattttcagtatgttgacacaaatttttaaaggtcacaaaacaatcataatttttaccattatttattaagatagctttacatggtcattttttcatttttatttttatagaatataaaaatgcagatttcttgcatgcatatattgtgtactggctttcagtgtacccatcaccygaaaagtgaaaaatgtacccactacgtaagttttcaaccctcgtgcatggtcattattacagtctgattctactatgcaaagtgaggattgccgatagctatgttctgactacggacagaacacaagttggctgagctctgctccagaaagaggtttcctcgttgttccaggcttcagcccagatcagttctgcatcttctcctcttttgctgtgtttacaagggtacagtgagatcgatgtgacaaaactacttccttctgcttgttctcctgtgcttggattcttgtccatgctttgtttatctgtggtcaccacttattggtgcatttattataattatctgcttccttgactggagcccaggggaagagactggcctatggctatttctgtcatctttttattcccagttcttaacatcttgcataacaagtcatcgataaatattctttgaacgaatgttgaggatattattttgagcaagcacaaggtcagttagctgttactctttacagatcaagttcagttataacaccattagtaatgatttttcaaaaatatattttgcagaatcatttatatgagttaatcatttattgacctcagttaatagtcaataaatcttaaaaaatggccatgtcaaagaaatcagaaatactgatacacagaatattaaagctgaagagggaatgcattacttaagttttgttttgtttttattttttrgttgcaagtaataactgccttataccaaaaaagtacataagtaaataagaaatgtattagaaggatagtgcaattttttttttcagactccaagaaagagttgaaaagggtgggtggcttgcgaagggtgtccatgggccatctctgagccgtttgacatcagcagtttaacattcttccatcagtatctctattttttttttttttttttttttttgagatggagtttctctcttgttgcccaggctggagtgcaatggcacgatctcagctcactgcaacatctctgcctctcgggttcaagcaattctcctgcttcagcctcctgagtagctgggattacaggcatgcaccaccacgcctggctaattttgtatttttggtagagacagggtttctccatgttggtcaggctggtctcaaactcccgacctcaggtgatccacccaccttggcctcccaaagtgctgggattacaagcgtaagccaccatgcccagccaatatctctattcttaatgggccacaggtcccagttcctagcctttatgtctctctgttcaaattccaaattcccagaaacagaatatcattagcctagctatagcctgggagatgggaacaaagagtccaatwtgggctacttggatctacttctttcctggagaaggtattatttttaagagctaggcagatatttttaaaaggtgattactatagtgttttactctgaagtatatattctttattcccataaattttcactttgcttaggaattgaataattgaaaagcagtctttctaaattttttataaataggaaaaaatttaaatattagccaaagaaattctctcctgagtgccttaccatacctaaataataagatctgttggccttgcaacagatacagattttattattcaggtatggtaaggccaacagatctaggaacaattggcattgaaaaaatcattacagttcccagagcaggaggcacagcatgccacccagggccacactgggaagcaccgcagtcagtcaggaggcacagggagcgggaggagatcccgggcaagagcctccactgtggtttccatgggaaggcttgggtgaggcagggtgagcagggttaggctaggctagtcggattaatttcagaaaggtctggkacatattggtggttctagttgtctggtacctggccctagggtgattagggttggggaattgtggcctggagtgtaagagccaaaggtggtggtggttggggaatgggctctggattggttgatttgcatatgaagggcatgctcacaggagaattgtgtgctatctctaggaattagcaaccctgagaagggcagtccttccagggtcagcaaagccccagaagtcaaagcatcagaaacacagaaaataaaaatatacaattaatacagctgtccaccttcaatcagttttgtgagtttccatgtgaaatccagttttgtaacaccttcaaatgtcctagaaggccttatcatggtctagccctctgccgtgaacctgacctgctcccacccttttgccctcacaccctcccttcagtcacccaggctcccttgcagtccttagaacacaccaggggctcatagaactctgcctggaatgcttttccttccaacataaactgggcttgcttttctcttgccttcaggcatttgctcacacgtcactttctcagcaggacctattctaactgcctacttccttctgctgccggcacccactcctgacccccttactctgctctgccgggtttcacatagcacctgtcatttattaccattctgtataatgtgcttacttaatattctatttattgtgtgtgcctctaccactacaatgcaaagagtctttattttgttcatcaacataccataagcagttaatagcagtgtttctgaaaattagtgatagctgttgtaatgcccaacaagagaattgttatattcttactgtattagtcaaagattgaggcataatggtgtcaaggaaatataaattgctgagattcttgtttagaaacccataattcagccakacaggtgagagacaagaaatgtttcaccttttttgacttctaggtttggcatattgagtttcttgtgttaataccacagctacaccaagtaaaaggttattgactttttgcaccaaccagtttattctacctgatttttctcattcaggcttccttgttaacagtttgatttgaaggctttcattatcaaaatccacaaggttgtgtccttcatttttcttgggagagccacctcctgtttcttcctggaaggaactctgtggctggaaatgttaggagcttcctgggctgaagaagttcagaccctagccagtccagggtgctcctaacaaatggcatatataatatatccagatatttattgatattaaggaattattggggaggtttagatatgaaatgatattgtggtttgttctttttaaaaaatctttatctttcacagatgcatatggatgagataaaatagctgtatttgccaccatctattataagagctaggaaaatgggtagggatagagatgaactcacattggctaggagttggttattgctgaagccgggtaaggagtacgtgagtttcattatattattgtttctacttttctatatacttccaattttcaattaatraaagtatttttcagctgggcatgtggctcatgcttgtgatcccagcactttgggaggccgaggtgggcggatcatgaggtcaggagttcgagaccagcctggccaacatggcgaaaccccatttctactaaaaaaatacaaaaattagccaggcatggtggcgggcgcctgtaatcccagctactcgggaggctgaggcaggagaatcacttgaacctgggaggtggaggttgcagtgagccgagattgtgccattgtgctctagccttggtgacaagagcaagactccatctcaaaaacaaacaaacaacaaaaaaaagtatttttcaaatgtaatagtaatgattggacaatttggcttgtttctgattttaagtgaaacacgtttggtgtttcaccatgatgaatatattgactattgactcaaaagctcttcatgttgagaaactacccttctattgttaattatttaaaccagacgtgggtgcagaagaatattgagtgccttaacgatatcttgagattactataggtttttcttattagatctattgctgggaggtggttttacatgttattcatagtaaagccctcttgcatttctcagaagaccccacaggtagttattttttcatttctcagatatttgctgaacatctaggaagtgccagcctggtgctgggcatggggggtacaagcagggaacaagccaggccgagccctcactctcctgaagcttacttctccagtgagggagatggaccataaatacataaatgagctcaggtggtggtagggtagtctgtgtctttctggctggcagagaatctgtgttcctggacccaagggatgttgagggggaaactgtgtaaagtattgctaccttcttttctgtgggtggaattgcttctcaatgaggcagttcatcaatagaagcacttttccctcgacttagctccatcagctttacatttcatgatcattctttccagattctggcaaagattggatgttaaaattcatttttgaggttgttttgagttcccttacttccttatgtctataggtattttagtgctaagttcaaagaggtggcctccagggacttaaaggcaaataccacttgcaactggaatcaaatatatgtattgtaaatgtaaaccrtaatctaacctgtgttaactatctcattaataattttacttatttaaaaacaaagctaattaggaaattagaaatacttgtaattgcagtgagtaacaatcaccaccagagtgaatgggcaccttctctgttcttattcagttctcagaactaacttatgtggcactgttctttcactcttagagcccagaaactataggccaaagaggtgaaataccttgttcaaagaccactgtaaccaactggaggagctgggatttgaaccctggtagcttccctctagaggccccatttttaaccagtataccataggcctggtcttttggttgttttggggggattgtttttggctttgttttagacagggtctcactctgttgcccagctggagtgcagtggtgcaatcatggttcactgcagcttctacctcccaggctcaagtgatcttttcatctcagcctcctgagtagtggagaccacaggcatgtgctactgtgcctggctaatttttttgtattttttgtagaggcagagttttgccatgttgccctggctggtcttgaacacctgggcttaagtagtccactgcctcagcctcccaaagagctgggattacaggcatgagccactgcgcctggccactaggcttgtttttaatagtctctatggatgatgatttatttcaagatgccctttttgttgtgtttcaggttttgctgatctttgcaaaggaagatagtcagagcgatggcttctggtgggcctgcgacagagctggttatagatgcaatattgctcggactccagagtcagcccttgaatgctttcttgataagcatcatgaaattattgtaattgatcayagacaaactcagaacttcgatgcagaagcagtgtgcaggtaccttctctaatttaatatgcttagtaaatgttcactttacatcttaaaacgaatwtcatttatagatatctttagtttatttcaaatatttttaaaatatgcgttgatgtttttaarcagtgtatacagatgtctgtggtgaaagctatagctccttcctgtagatttctctctcctcttctacttttccacatttgagttgtactaaatttagaggtgtgagctgggctcccctgataacttcagggtattccccccaccctgtgtattgctcataaaaaacattaaaattcacacagttcgcattacacagatacggtttggatttaaactagctattttaatcttcattattctctcccaaaatgaacatcggaaatgtgtgaaatataaattttttcctgcctgacacagatgggtagatcccatagcaggcttcccagtcatggagtgaatgcagccacttttgcagcaacagaaaatcttccagggaccaaaaccccctgcttgtttatagaaatgcttgcactctggggaggaaacacaggcctgttcataaataaatgctcagtcrtaagagttagctctggatgaactgattcatttagcagaagtggaatgctttgaagctagatggaagaggtcactaattaaatgctagaccaagacagagtccarttgcatggggagctggaattttcttgaatgttagtaagtgaaataaaaggtgagaaaatggctttttagactttggtaccctgacaagaaattagtggattaagagaagtttcttatcgcaggcatcatcttgytattctttgatgattttcagtttcccaaagaagaatttttcttaagcatctgttttagatatgttttaatggcttcaaataatctcatctttctgcataaacatatttttctatttaatagtgtatataaatatacatatagtatatcataaaatatctggatgctatttttagtattaggaaatatttttgatgattttataatagaattgggtcttgtaaaactaagtatttctgatttttcttggccttcacttacttttcctatgtagttttgtagtagaaatatcacacttctttgttcctatatataatcacttaagataagctttacttaaaaagaaaaaaccaacaggaagaaatcttttaattcaggcaaaggcccagtttagcagataagctttacatttttctttgaatataaataaataagagttttatttcctaccaaatatatttctgtgttagctgcacagaaaaccaatagcggtctatgcagtttagaagtcagatgtacatatctggcagtgtgtttcctgaccattattggtcttgttgagggtggccagattccaaatgcttgactcccagcacacattccctggggagatgggtgggtgacacgctcctggcagatgtgcattctttgttgtcacctgtggtgctagatccctcacccttgagctaggactggaccttagcctaacatgcgtccttgagcctcagccccaccttctccttagtcctctcatccaggaagaggcctaggtctctcttaccataccggttcctttggagagatgagagaaaagagacagcagcaggaagcaacccaaaagatggaagccagtcccaaaagaaaccaagagagtgtgtgctccagcccagttatgctcattacatgtttcagcctcttgcctaaaacccacrccttaggatatagcccagcagtgtgtccatgatgcctgctggggtgggaaagactgaatgaagttgagaagtacttagtgtttccctagagataagaacatgcctctaaaacactatgtatkttttcattaggtgctaactggtatttccactgagtatccacccagtaggctcctgagtataaaataagtatagcttcaccttagcaggacctgccctgtggggtggctgactgggaagtagcctgtgctggcattggagggatattgacttatgcctcctgccccattgtgagttaatagcattttctccaaaagatctctttcaaataccatttatcaacagaggaaacttcacttcctgggaatatggcagccgatcatttccgggagccttccccccacacagtgtgagggctcaaggaacaggacatggagaaggtacattttttgagaaaggtcataaaatgttggagttgaagaggatgaagcaataygagcyggctgtcccttggggagtggtagttcaaatacattaaagtagagaggagcagaaatgcccacagccagagagaaaaacaaatgcatgttgtttcacaaattactcaggagtaattctgttcttggagatcrtggttcccttccaagatatctcagaataagcagaggccagaccaagagaataggtcaaagcaagctgctgattcacacctagattcaagtgtgtgggcctttattaaaagtttgtccaatttacaaccccctgaccagaacagtgcagaatctgggctgtagcatggcacagctaagaagtttcatggacctcaaaattctatgtcctgattattttggtcctgtttaattcctagggaataaactaactatatccaggtggtcctagtacaacaaacattatatggtgacaggtactatattgcaacatttctcagccccagctgatgatcaagttgtttaaagtatttaagcacaaactacagcaggactgaaaaattgaggtggctctttgtaccacctttaattggctttaactggcatttgtacatccagctgccagcaagtgctttaatttttatcataagctcaactttctgaactacctgctattttaaaagaaaaaagatcaaacccagtgagctcccccaggtacatactgataagaagaggattgtaggactgccaatttatttttgttttgaagagtggagtttcaattttaaaaaatggaatttaagtggaatttgccagttttttaagtggaaaattggcaggtctgacctattggataattgcctgggagttaagagaaaaaaaattttttaacgwaatgaagagattgtcctaatccacaagsgcatctttctttgttgtcttctctgtgttttgagacgttttctttagagaaagatttgatgttgtatcattttcagtgtgaagaagttccacattcatttaatgtaacaaagcccagatcaccttgtttgacttggagccttctcattgcaggtcgatccgggccacaaatccctccgagcacacggtgatcctcgcagtggtttcgcgagtgtaagtgcacctcccattcccagatggaaggagtacygttcattctgaaatatttgtcagatgtaatctggtttttgagctatctaagcaatgggtgtgtcttgggtcctagaacaccagccttagatcttgatcttgctttgggggttttgtttgtttcacaagttcctggaaatatttaggtttttctctgtatcttgtgtaattgcctttagcacctagtcatacacctcagggagaaagtttactcattatatgccaaaaatgaatggaaaatttgaggaggaggtggtctggagaaaacattgttccagtttatctcttttttttcctttgaagaaaagagatggggatatgcttgtttttcatttaagaagaaacacattttttttcatattcaagcatgagaacaaaggggcactaaatccacaagacaagggttgtgaaattgatgttgggactgatatgtggctagaggcaggacagtagagtttatccaatgctggaaggcaaagaaaagggattgcgctgtaggtgcaatgaaactgtaggatgagcgcttgctctgctgggtttatcgtctgaagtggccagcacttaaaataaaagagccagcaggaagaaaagttgtctgtgcaagctgcagtggtagaaatcttggcaggtaacaaaatttgttgtagtcttttaatggctgtatttagctttgcagagaataagaccttatttaggacctaggacctattggatttggctgcattatggcatttggcacaaattctgcgacaaaggccaggaaagtctggcccaggggacttgaaatgcctcattccaaagccatgtggatacaacaggaaatcatggctgcaaagtcttaccctcactgaagactcctacttacctgctactccttgagtgtctccctaggggctatgtcttctcactttgtttgatacccaccatgggatgtggtccagagaaagcagagacattgtcctcactggttcattacacctctccatcctggtgggagattaagattccacagggaatgaatgaggggaactgagacataagatcagcatccttcagccctcttttttacatttatcttctggacactctgagatctgaatgaggtcatagagtcttggacatcaataccagaaatgttcaaggccacacagcatttttcccaagcctggctattacacgggtccaagaacaaaatactcttgtttttctgactcatatggcaaaaaggtttgctagtccttgacaaataatggttgactatggcttatttgttatgatgtcaccgatttttcctggtttaattatacaatagttcatatagagagagtagtaataaaatgaatgtgtgtgtctatgtcacccacttaagaaataaaacattattaatacccttggaaccctttttgtggccttcctaacagtcagagaagatagaatttggagttccagaagaaaaagaaagtgggtaaaatagcttttcccttagggcaggaatcagctgtgggtaatgccacaagtcagcactgggacttctgttcctgttttctatctgcgtttccacccaatcccttttattccatttttcttccctggttcttaggatatgtcccccatgttacttgctggctgtctcagacactgtttctctatcttggtgatagagagcccagtgatggcatgtcttcatgacaagccaatccacatcccaccttgtactcaaactaaagtcctgagactcagcagtaagctcactatagcaaaccctcttgtgaaatgagtagcaattatccatttttgttttctctccttcccttctaactgtgtgttcctgctgatacttctctcccatttggattgggggtcttgcagcctggaatgctggctgtcttcctcatgttgagagctggaccagctcggttttggtgtgggagtcatacttccagatggtttgggaacaattgtctccgaatgaacagtgcacgtaacatgtccctttatgggactgctcccatacatgtggctcaaccccaaagggcagctgagttggaaagggccattcatgtgtactgagggtgatacctccaggtacactgctggagctttctctgctgtttttgttctttttgcatctggaaggtagatgtggggtctgtatccttgaaggcaggtgtgccccgtgggcacgtgctcgtcaggaagccactcttggagctaacgctgtgtggcctcattgctctctctccgtgtttcagtgtgaggaatcctggtttgtatctgctgagtgaccacattttctgctttgctgcagatcggatgaccatgaagaggcgtcagtccttcctcttctccacgcaggcttcaacagggtatgtacaagatatccagcatctctctcagttgcaggcaccttaacccctaactctcccataacagggaagcaaagctgccacggagaactgttaaggaaattaagccccaggactgttggggaaaggaagaaactgtgttctcatgggaragtaacgagcagctgccagtcgagctctttgcgtttttgctctctgggttatttccatatatcttagcaatagatatacaatgacataaaaacacatcttattatatcagactaaaattctgtcatcctaaagtaataaagtaatcttatttaaatcagtacagtcaattcgatttaatgtgtgtgtgatcatacatagatacatccaccaaattggcacccaagattctgttcatcagggctggccagagcttctaccctagggacaggcccatgatgactgtagcatcctgtaaactcccggttgaaaccattaacatcagcaaagaaaaattctttgagtgacaaactacacaaataacactgagattccacttgaagattaagaattactccaaggaaactcactaacaaactaaataaccaagctcacccagcatctcagggtagaaattagattggaggcaaagctgtgtgcctgcaaatggaaaggaactgatagaatggacttaaaagagaagaaagagaagaaagggaggaggaaaaagattatcaaaacatgaatgtttaaaagaactatattccctaatattaaaaagaaaacaagtccttatagagaaattgtggaagaccttacttcatattttaatttttttaaataacaaatatatatattactcctatgtaaaaagtaaaaggtttcccttaggagaataataggatagaggaccatggtttacttatacagcttttgctgataatctaaacgcaagtaatcctatagcatcctgtgacctcctggcttaaactataaacatcatgaataacactgatattcaacttgaagattaagattggttactccaaagagacttaccaaaaaaactaagtaactaggcatacccagtgtctcaagatctcttggtaagagtaatctgaatcccggccgggcacggtggctcacgcctgtaatcccagcactttgggaggccaaggcaggcagatcacctgaggttgggagttcgagaccagcctgaccaacgtggagaaaccctgcccctactaaaaatacaaaattagctgggcgtggtggcacatgcctataatcccagctactcaggaggctgaggcaggaaaatagcttgaacccaggaggtggaggttgcggtgagccaagattgcaacattgcactccagcctggacaagaagagtaaaactccgtctcaaaaaaaaaaaaaaaaagagtaatctgaatcccaagtaggtggagtgatgtatttcttaaaaaatagggtactgcgtgtgccttgtgaattatgaaaatcctctgtgtgctttaagtaatggtactttgctactcctggcttaaaaatatatatatatattcctgttagttgtagaccacagagaagcaaaaactacctttgtgatgcagttgttttgtgctttggtatgcttcagtgtggaagaaagtgctatagagaagattcaaggtagtctagtggctcacgatgcgtgatagaaatgaatgtttccagctagcaatatttttcacgctcctaacacttttttcttgtctgttatctcttctcacaaaggttggcatttggttctgaaagctattcttaggtgctatatcttaatgagaatgcatgagacaatgcttctgagtttttggaatgaagagttgcaaaagaaaaatcagcaaagaagccatgtggttgagacagattttctttactcactcattttctaagaaatagctctaaaattattcacaggcttcatagaacttctgtgtaatattgaccccccgactctaccccattccaatgtcatccttttcaagtttgagttgggacctcatggagtgtgaggacatagattttcctcattacctaggagatgattggagaatggcaatgacacactgtgggttttatcgatcaggacccatgtacgtgctgttgagtgtccttttggaattctacctttagttcagtgatccaacctcaaactggtctagaattgctgccatctgaagcgatagcatcttgtctggaaggctgagattgcacatctgctcacagttaggagaaacaacwggaactctttgggtgcaaatgctattgagaaaatttaaccaaagttccattgtttccttcttacacattttacaacctgtccatggggctctggaaggcttcatttgccactatccagacatgttactgtgttttgcagtcagcctcagtgaataaagctttgggggaggggcatgaacagcggtagctgtcagggaccacctggtgttcttcagtgctggccctgatagaggccatttgcccattaggtcagggtgcccccagtagcttgggctcattccaggagaagcaygctgcacctacaacagctctcctggcattactgtggcacaccatcagctgagactgatcttcatgtggtggttctccttttttgggcaaaatcctgtctttcacaactctcttcccaagcaccttttcaaatatgccagttatctttgccttccatgaagttgtttcccatctctgagctggtttgattgtattagattatctgctgaaactcacccctgtgttgctagctaattggctggtgcttcagtctgtggtccctgagtggggatctaggaacaaattgtgccatcacatatcccacaacaactccccttgaaggctctggagctatgtgtaagcagccgactatatagatgctaattccatgctgagccttttagaaaccagcatcttagcaaaggacagttgcaactgtttttatatcaactttatgtgcctctttttctatttgcaaaaatatttgttcaatttaacaagtgtttatggagttctgcctctgtgcaatgtgctaggcatgccgggggcacaactgtaggacacagttctctgtggagaggccttttgtggagtaggaagtggggagctacgatttattgtcaggcccagttcccagtgatttacttaatcctcctctacatatgagggatttgatattttctccwtttttgcagaggaggaaacaggctcaaaacaactaaacttgccagagctcacactcatgacaragtccagaagcaaatacatgttgtttaactccaaactctatattgggttcactaaagttagatttcccaagctagtgttccacagaacaccactgtaccaaaagctattaatacatggtccatgaaaaaagccttctatgatcaaataagtttggggaatcagtgaaaactcagtttccccctcctctcacacctgagaatccacagagcacttttgcaacattgcayattagcattttaaatactctgagaagtcccatagtaaagaaacctgctaactttgtttatcccaacattttctttccattttttgcaaaaactaatccatgtttgttatagaaaatacagataagctaaaaattaaaattatttatgccaccagcctttcagatttatttgtaggcagaaatagaaatgactgtgtattatttacaaaacagtgtcgtgatatacatacatatctttctatgttattccagcattttcaaaacatattttatcatggttttttcatgtttttacaaaacatgagctaacaactccctgagttctgttataggctgatatatagcttttatccatctaaaagctcaaatggaatctaaccatgtttaactttgctctgtaaatcaaacagaaagtatttcccttatgtgtatgtttatggcttcctctcyttccttagctcttcccagcttccacgtaagaattgtggaggaccagaggcccagggaaagccagggagaagccaaccactccagatatgtggagccaaccactccagtgtatatgtggggtgtgtgtgtgtgtgtgtgtgtgtgtgtgtgtragagagaggaaggagtgaggagagggattgatttttttctctggccaacttgggtgaaggaaatctaagaaatacatctttcagcagggcctagtattctcctcctccacttatatagctaccggagaagcaaaagtatgtgactagtagtttggaatactttggaattctgcttatctttctacttaatagtttgccagccatatgcttagaaaggtttgcatgatatgtttttttaatcaattaaaatgcataacatttcccctttcctaagtagaattgtccttaaatctcttcccttactattttttacttgcttttttttctgatttcattatttctcattaagtattgatgtgatcatgtcagagaagtgctcaatttcctatataccctacactgaatcacatagcatatataagaaatgtaaaccaaattactttgggattaagtgaaaaagggcctactcctctttaaacgcgggacttgagcagctcatgcctagcataaataggtgcttcgtagttctttgatgaatgacratgtgtgctgcattttcttctatgttattatttgcttatctatctgttcattcattcactaagtttatttataaatacatgaaagccttttttttcaattgagatgaaactaaaattagccattttaaagtgaacaattcagtgacacttagcacatacacagtgttgtrcagccaccacctctctctagttagagtgagaacctgttgcaaaacaaacaagcaaaaagccattttcatcattcccaaatgtgttcccattaagyggtcactcctagtcctcctccccacagccctgacaaccaccagtctgcattctggctcaatcaattgacctattctagatatttcatatacatggaatcatacaatatgtgaatttttctgtctggattctttcacttaatacatttttcgggttcatacatgttgtagcatgtatcagtattttattcccattttatggtcaagtaataatccattgtatgtatacaccacaatttgtttatctgttcaaatgttggacatttgggctgtttctgccttttggctatggtgaatgatgctgctatgaacacacatgtatgagtatttatttgagtacttgttttcagttcttttgagtatatacctaggagtggaattgctggatcatatgagaattctgtgtttaacttttcccctgcattaggcactcagaaaattaggaaggaagtaaagagtaggctctcccttccaaagagatcattgataatgtggtgcacactgaacatgctgagtgttgggttttagatgattttattagtgcaatatgaagcaaagtgtttcagtcatttacatggctgggcaggcattccgtgctctagagcattcataatgtagtttattctacctttgttatgcaggaagtgaagtgtacagtattacttgctctgttgtttctcatacatttaaacaagcactttgaacaccttgacagctgtttcatctcatcttacctactaattgtcttatataacggagttacctggggataggaacaactgttaagtttctctatttgactctctaagaagtaattatatatgtcttatgtattgtctttgctttcttttcagagatttatggagaatagcagcataattgcttgctataatgaactgattcaaatagaacatggggaagttcgctcccagttcaaattacggtatgtagcaaaatgatacagtaacatgaggttaacaattctttagaaaatcttatctgtcaacaggctgatgttcaggggttcatagctgaatcccagggattttgaagcttttaaacaggcaatgaatggcagctggccaacagcagtatctaarccagaaggcccattatataaagaaataaattggaagcatttcttcttttgacagtattttccactatttacagaattttaaaattgtaacctgggaaaatgcttaatttttgcacaattagatcgagattaggaatagccttgagaattattttctacttcctactttcaatatttatacatttttacttggattgttacgcataggggcaaactaatggcgatatttatcatgctaaccataaaaatggctaagtaaccacaatagcaattttattaagtctgtttgtggcctcaatatgcatgaagtagctttaagaaaccagttttaagtctctttacaagcatatagtgttttaagagcaggcttgtcattggtgctcaattccagggatgggattctctgcgtgtctggctgctggccagaatgctgggctgggggatgttctgctcctgggccctcttaggaatatcagggtcctagctcctgcctggttttgctcaggctccactctggcaggctttttggaccctgatgttttcctctcttctcagccagagagcagggaaaggaggaggctcttctccacccgtgggccactgcggggcccagtccccaggagcttcaggctgtgtgatgccagaaaattctgtagcatggcctctctctctggctgactgagaagtcatgcatagtttgaggctcaacacaaaataagtaggagagcatcctattatagtaattatatgccttatcttgattacttattgtcattcaaagacgacaaaatccttttcaaacttaattatcctccgtcccagggaggcaaaatgaatcgacataaacccagagaagcaggttcccctggggtgcaccctggtcagggaagtcactttttggtgggtagagtgatctaagaaataaagtgtggggataaacagtcactttcttaggtagaaaagtattaaraaaagaatctcaaaccagtgggaaatcagatattttgggacttcaggtatttttaacagcccttggtaagaaatattgccaaagactttttgagcgtataagtaagctagatcctgtggtttctttttatgtgtatgtcagcttcagagaacttcacagaatttttctagaaacccatgttgcctgtacttctgtaatttatgccttttaataatgtagattaattgttattattcctgggggtctctactgtttttaattgaaggttaaaagacttagtacttttattttagatgtttacacaataaatagaattagaaagagggggattttactgtggtttaattcttcaactgtgtattacccaccataaaaaatgaacrgcgcaacacctcattgcattgacaggcaattccattatttgattttaaataagtgcttctggttttttaggcaacattacatgtgatggcatatgttaggtgccaggagatgccctaatacagattctgcagtgcacatggggcactggggggctgtcccaggaatgttaggggcaccttgtccatgatgagcagggcaaaagcaggcctggaaatttgaaataaatatccccagccaacacaatagcataaagaaaagccttcaggttattgtactgctgaaatctgtttagagccagggcaccaaagactttttaaggtcttatcagattcagaactttgcaagtttctaagtacattatgtaagtactatacttctgacccctcacttactagaactggttgggggcattggacccgttgttgaggtcataatgaaaaggctcaagttcttactacaaatcagtgtcaaattggataatggacttgacccacgaaggtagtggccccaggaaagaaggtttgcctggcacagagattatcttgccttctgcacaagtttcagctgttgctttttggtgggttctgcctcaaccttattcaagttatcgcccttttgggtgtgtgtgtgaacatgtgcatgattttatgtgcatattcccaggtattctgtatctaggcccagcagataggggcagtgactcatgccacggcctctccccagctccttagggcactcagggacatctagcacatatacctgcaccccaaggcaggcaagcaactctatcatttgttgcagactgggaaaatgaggctctttattatacaatgctagaataattatagtctaattatataatactttcccctacaattccgcccccagctgcagctaaatatgtatcattactgtcattctgcaaggacagtctgtactgcaggatgatggtgaatgttaaaggtagacacctctgcctaggtcccatgtcaggtgaccatatttacttaaccgagaaacaaaaaggatcacctgatgtgatcaaacagaagatgtagtctaattttaagattctattatataaaataacttaaagatataagaactaaatcacatatctgtatgcctttgatgaattactctgttgaatagaagaatttatgaaatggagagcgtctaggataatctagattaaatgatgactatttatctcttctgatgttcttacacctctttatcatgaaaagatctattttatctaaaataaagataattatttagctacttagcaggagtttgggctgatcgatatatactaatgcagtaccagctattgtttgattcattagtcagtctagaagttacatccaagtcattatgtttatttcactccaaatcttaagacagtagcaatcctcaattttagaaagaatcaaaatttttggtgggcaaaactctgtattctgtggaacaccacatctctcagtattaacagacatttgtagagcactttattctcatatgggctctgcgtgatagccattgtgtttcaggggtggaaactgagctgtgaaggcttaaaatarccagtccctattgctttattgcccagtaatgagtgccamcaagtaacaaggtcacgatcctctcacctcttccactccctgctcccaactcatcccagactcctgctggtatgtggacttgtgttcagaatcttttccctacaagccaccgccttgcccagtcctacccttgttccaggcagcctcacagtgtgtgtgtgtgtgtgtgtgtgtgtgtgtgtgtgtgtgttgttttastggagtctagatagagcacttttggaagggacacaggagataatgtaacccaacaccctggccatgattgacagaggaaaacactgagaaccatcacagctactcagcatgttggtggcmgtggtggagtagaatccaggcatcctgctttttcagtctggtgcactttccactcagcatagcactatattatttatagactttatacctggacccctgtaatatttaccttttctctctggaccttcgagggctcttaagaaggtgcagggaaagtggtgatattacctatacttcatgggttcccacaactaggttacttttcccttgtgtttcttttttctagttttccaactttttaacctgaagaataaaacataaagatacctgagacaaaagagttatatggttcccaagaacagatattaataaagctaaggttcttctgccagaagagtatgaataattaatacaagcaattaagttctaaaactctagaaacatgactcaagttgattatctcattttgctgcaggtttatttaaatagaaccatcaaccaaagaggttgagagcctgaataaacgttgtggtctggtagtgtttgttgtggggggcaggggtgggaaatagtgtgttctttctaccaatatcctttcatttcaactgttgataagcatttactttgtcttatggggctttatacttattgaaaatttcatgctttgtggataatcataaaatgaatgtttaataaattttggagattggatctaagatcatgtataaaggcaacctcttgaattgatgaaaatgataatagtctgaagtacctgtttatatacttagttgaaacctgtttacatagttagagaaaatacttaggcaagagaggaatttgtcatttgataaaatgtgttaattaaagcttaattatccagctctcaaaattaacaaattagtccacatagagtgtgtttctccaagagtgacttctgaaagacagctgctgcccaggaaatccttccctacagtgcttcgtccagttttggaccaggtgcctggaaaacactgttgataagactagctcttgctgtctcttatgaggcagtgcagtgacaaatttggtagcagttttaaagcccccttttattcttgtttcttattttaaattgtgtttacaagtggtggtactaagacagtatacagttcaaattaggtagactggagcaatttaaataagaaaatatactactgcgcctgtaagccatttcagttgrgttaggttaatattctcctctgctcttctaacccgtatcatgattacttgttacacttaccttctcacactgatatcttcatttctgcaactataggaatggcgtcytgcagttggctaaaatattgcactccgcacgcatacctcactattattgaatacagttcttggtttgacatttcaggtatacttatgagaaaagataggttacgattcatttttttcaccaaagccttttgaaagccttagagaacaaagaagtattactctgtgatcttaaacataacaacaggtawctacatgtgttgtattctcatattgtcccaagcacttcgagaaatgcctcacataaactatctgttttgatctttacaaaaacctgtgaaatacgtattattatcctcattttatggatgaggaaactgagggccattgaagacaaaaagttgcctcaggtcgcataactggaaaaatacagagccagatttcacccagttctttctgccttcttccctctaaacggatcaaaataggaagacaaagttagaatgcctttatgagtggaaaaaaataacatttttcagagtttttttttttaaagaaaaaacatcaatccagtaaatcaacagtttttttttattttgtaatgtgtaagaaagctttttattgggattctttaaacagtcagtataaataacagagctctagctacatgcttgctgtgttggacagtaaatagcttactgtatttggagttgctctagattaggaaattagttaaaactatgataaacaaaatgagagtttgattccaaatattccagaaatatagggaaggtcaccaagaaaagtccccactggagagctgcagaggtgcartgaaccagcaaggggagttctgctgggtttgcctttcaccatgccagggggaatggttggaagccgagtaacatcacaacagcaaaaaaggagaaaaaatgtttttgtgtctgttgcaaaaggccagaatacctcacatccaatttgggcccagttaagttctctaattgttggagacttaacttctccatgaccacaactgtgaatgaaacagaagaacgtcattgcctcgtgttagtgttgaagtttcattcagcacacacatagtccattccatgatccacraagatttcactgaattacarttctttttgtatcatacacacagatatatatgctattgtttatgcatttagtttgaaagattagtttttttccctcaaagcatattattaaccctcttagtctgttaggattgcaataatgaaatacagtcatgcatcatttaatgatggggatatgttctgagaaatgtgtcgttggatgattttgtcattgtgcaaacatcatagagtgtacttacacaagcctacgtgktatagcttactacacacttaggctacgtggtacagcctgttgctcctaggctacaaacctgtagagcatgttactrtactgaatactgtaaatacttttaacacaatggcatttgtgaatttaaacatagaaaggcacagtaaaaatgcagtataaaaagakttaaaatggtgcacttgtataaggcacttagcatgaatggagcttgcaggactgggagttgctctgggtgagctggtgagtgaatggagagggaacatgaaggcccagggcattatgtgtataggactatagactttatcagctttgtactcttaggctacacaaaattcattaaaacattttcctttcttcaatagtaaattagccttagcttactgctactttttaactttataaacctttatatttttaaactttttcactttcttaataacatttagcttaaaacacaaacacatttcacagctgtacaaaaaaaatgtttctttataacattattctgttagcttttttctatttttaaatctttttttttttttttttttactttttcaacttttttgttaaaaactaagacaaactttggctggtgcctacacagagtcaggatcatcaatatcactgacttccccctccacatcttgtcccactggaaggtcctcaggggcaataacacacatggagctgtcaccttctatgataacaatgccttcttctgggatacctcctgaaggacctgcctgaggctgctttacagttaacttttcttagtagtagaaggaatattttatctaaaacaatgataaatagtatagcaaatacataaaccagtatcctagttatatcttatcaaatgttatatactgtacatcattactgtattgctacacatttatacagctgatagtttagtgggcttgtttacaccaacatcatcacggacacgtgagggtgttatgtctgctacgacaccactaggcaataggaattaggttataatctcgcaggaccaccattgtatattgagtccattgttgaaatatygttatgagttgcattactgtatcttaaawtgagtaatttataagcaacagaaatgtattgctgacagttctggaggctgagaagtccaagatcaaggtgccagcaggttctgtgtctggtgagggcctgttcctcatagatggcaccctctctatgtcctcacatggcagaaagtgcaagggagctcactggagcctctttaataaaggcattaatcccattcatgaggatgaagccccactgacttagccacttcccaaaggccctgcctcttcatactatcacattggatgttagattccaacatatgaactgttgggagacatcagcattcagaccatggcaataacaaaaagtacgtagatttgatgaacctggtatctgtttactttgttaaattaacagatgaaatgtgaatggttttcatagaagaactaacttcaatcttttataactttcagggcctgtaattcagtgtttacagcattagatcactgtcatgaagccatagaaataacaagcgatgaccacgtgattcaggtatggaaagaaaccacctctatcattaacattcaaaatgaacctttcaggtttaagccacactttttatcaagtactttcccatcatsctcatgtatcagcacattttcttaggagaaataaatatcaagctgtgcaaagaatactgatagacttaagaattagatattcaataaagaacaaaaaattattacttcagatcagaacctgcaatttctttgacagaaatggggtttaaaaaaattttatttttttgagacagattgtcactctgtcgcccaggctgkagtacagaggtaatcttggctcagtataatttctgcctctcaggttcaagtgattcttgtgcctctaagtagcgaggattacaggcatgtgccaccacactcagctaatttttatatttttagtagagattgggttttaccatgttggccaggctggtctcaaactcctgacctcaagtgatccacctgccttggcctcccaaagtgctgggattacaggtatgagtcactgcacccagctagaaccggggtaaattcttttgaccatctgtgaagacactattgacatagaagtaagtcagaatggtacagcaaatgcttataaatgtctagggaacagagtattttcaaagacattcatttgtttacctgcagtgggtatcctaattacaaagcattcttacatgaatgtcatcctcctaaggaaatgtgtgtagcagagaaacctttcaagaaatgaggtgttcttattataattgttggaaagtaagacatctgtatttgtaaaataccctgaaatatagactttccacgaattggtgcttgcctgcctgctgttggtttgcagagtggcatggagtgtgaggagcacttatcagtagggcaccaaagacagtgggcaacacacagcgaagcccacagcagaagcctcacatttgtctgccctgaaatctcccagtgcacacatacacaccttgttctcataccagaccaatgacatcaayagcccaccctgcctaggccctgtcatcagcactttcattaggttgtctcatttctattcaataagggtaggcaagagacatcattgccctatagtgcagatgaggaaactgagtcccaacaaggccaaggaacttatccaaggaaagccttagtaataagtatcagaactaaaatatgtagtcatgtctccaaagccttcctacctggtttcctgtttagctgtattgttagaatatgttttatggctgccccgtgaaatgyatctgaaggcttcctcatgwtgctggctcttagtggcccacctgcccacaggtctgcctcttggacctcagagagagccagacgtgtttctgttacagaccaagcacaaaaatcccacatctcccccacttataccccgacttggacaatcgattctattcatgaagcacatttgctttgcacctccctgttttgcagtgtgcagctggatttgatttcagaaatgaggagaaggggctccctgcccactagccgcccctccacctgtaatctaacaaacracttctagaatagggaacagagtctttcattctccagttatcaattggtggttagaaaacctgtatccttgggagaggtaatattgtgatggtgtcacattatgatattaatcatctcccagcctttgygatgaacaggaagaagcaggagcatgaggccagtataacagatgcctgtaaaggagaggtggaaggagagtcactgcctttaaagggaaacttggattctgaaagaagaccttacagcttttttctcagggaaccttttcatcctcctttagaaaaatgtatcagcaatctgtagtatggaacttaaaacaagaggaaggaggaaggagctgaatagaggatgttatatgtatggtgaaattacctatgtgctataaattttgaggatgtcatcattggatgggatagttaatatatgttcttacttgatatcagcatccttttcagggcactccaatcaaatagttagatgcctttttgaatacaaatcttcagaggtcaagtagcagcacttaaaatttagaagcaatatctacctatctgtgtctgtctatccatctgttatctatccacccatccattcctccctcctttccttcctgtcttcctccatgcccccatctatctaaactctatatgtatttgctttaaaacacttaattgttacttgccatatactaggctcagttctaagcatttcacacatactcatttatttcttaaagcaatcctgtgagtcaggtatcactattgtactcattttgcagatgaggaaactgaggaccagggaagttaagtaatttgtccatggttctgtagctggtaattggcagagccaggatttgaacttgggtgccttggctccagaatccatatctgggagtacctgctgcattctgaggtttcaggaaccctggtgtgaaagaagggccatgacttctacccaaatttacaacttaatagggaaggcagaatgaacacacatgaaaaggtatgagaatatggctaacaaataaagaaaataatatattctctaatattttctattcattcctcaaatagttaataaacagtcctgagtatccaaagatcaattcaaaatagcctttgcccttgaggagttgaatgtccactgggagagacagagataaacaaaaatttaaattcggtgtaataagtcactgaaagtctgcacaggcatcagtggcagctcttgggagtggactaggtaggggaatcagggaaggcttcctggaagagaagagggataaattggagttggagagggaaagagacagggaagggtattataagcagagagagcacgtggggaaaggcccggagatgagagagacatgcagacagctcagcagcctgcagaggtggccccgggaggtatgaggctggctttgtgagcaggggctacgctgtaagtgatgcccttccctgcctagggagggccctgagtactacatgtcagtaatggggccaggagggggtctggagatccatgaagacaatatcaggcctccttctcttcagtcacccaccaaaggcctgatgaccagagcatcttccaaaccccttcaactctcagggttgatcgtgttaatagaagctgtgtctcccaaggaacagctccccaagtgtccctgtgccaccctgttcatgactgctgccatcacagttgagggcaagagtgattacagttggttcgaacatctccgaagcagcagatggatgcaatttaagcccaaagaaattcatgacccagatgcagtctgtttacattttcccgacattcttcaccgcttgtctctctccactcagcccccatctgtgatctttgaaaagaaatcagagggtgggacaggacctgggagtcatctagggtcatggctctaaattccaggaccccaggcagaattttgaaaagaaacctctgagtctgctggccccagaatctgccgaggggagcttcacacctgcctgagcccagcactgaaagggctgcctcctgccccagccatttaactgaatttattgttctgattctactggtagtgtccccaaactrtagcaaacattgatcaatagatagtggcaattggaaaggagacatgagaaatccagttgtggagatgtgcataatacaagccgccactgttgaatggagttcttatttgttcrtttgtttgtttataagagacagggtcttgctgtgttgcctgggctggagtgcaacggtgcaatcatagctcactgcagcctgaaactcccaggctccagtgatccttctgcctcagcctcmtgaatagcagggactacaggtgtgtgccacaacaactggctaatttttttatttttgtggaggtggagtctagctgtgttttccaggctggtcttgaactcttgggcccaactgatcctcctgcctcagcttcccaaagggctggaattgaattacaggcatgagccactgtgcccagcctgaaactttctttttttaactacaaacatatggacccagtcctaatttatttttatttctttttttgtctgagtttttccttattcatggggcggtagatggtgaatgagttccccaagaggctggtactgctagatgagggcttcctgtktttttcctgctgaagtttcttctgatatcctacaggggatcaggatggcagttgaatgaataaattgctgccaggaaggagggaactcctccaggaagggtttggggatggaaaggggcagcaggacctggccagctaactgcattagagaatgtttgccctgggaacttcttgcttgatattcctctgggtcccaacaagtcttcctacggggcacacagacatttcatgaattctgtcttgtgtccccgcactgatctgtaccaacctcccattaacagtatgtcaacccagccttcgaaaggatgatgggctaccacaaaggtgagctcctgggaaaagaactcgctgatctgcccaaaagcgataagaaccgggcagaccttctcgacaccatcaatacatgcatcaagaagggaaaggtgggttacaccagcaaaaccaatccaygaaccctctccccaatgcacttttttttctgagttttagaatttcatccttaagattagcttttttaataatgtcataattaagtgaaagatctattatgtttgcaaaatgagttcntttttaagttaactttggaactcaagtgaatctggtgcttatcattatggtacagaatctggtgattttgtgtgaaaacatttcatcctgtgcatgaatatgtcccatctgccattgctggaatatcgtgggtatctctgagcagagttccacccagagagctgttgtgttttttcagtttatccagtgtttgggagactagacatatttaataccagtatttataggtaggccaggtttttttcccagttttccttttctgttctctgatcrctgttcaacatacatttgtagcttcctcctcccagctgcacctgttcctccagtggcttccccttcatctgggtagatgaaggtaatgatggaagtccgagaggaattttccctgaagccctctcctcctgtagagcactgcctctcatcgctggaactgcctgtgcattttctgttaagcattcagaatgcttcttcacatacaatttctttcatcttcctttctgtgatgtgaagtagttaaataagccctgtatccatttaatagagggaacattttagagggataagataaatttggattatagatgatgatcaaaatgtttttttaattgaggcaatgagaccaaaaaggaaacaagacattgttaactattccaaagattgttgccaaaagaatatagccacacataccaaggtgcataccaattagccaccttatgtgatagaggggacaagaaatggctgcagggaatcggaatctcagtttctgattagccaaacctcccatgttcagagaacaggaaccratactctccccttggcctctttcacggaagctaagaggagccagagtaacccccgagaagccttggctggggggcccgtaggatgttaggaagatgatgggcttcagcgagtgttaagtagacatgaatttatacgcagattttctgcatcctcatgtgggcaagttacctagactctctgagcctcagtttacccacctgtaaatttagtatgataatgccaagttcacagattgctgtgaagattttgagagagacctccaaagaatcccttgacctggtgccacagcagccatagggctgagagcagaattccacccacaggtcaagtgtcctggaagctgggacagacaacctggtggtggatatgtggatctgtggtcttgttttcacacatgtggccacatcagcattgcactgggtacaacaatacagcaggcattgggaaatgtaacgagagcatgtgggaatnttccttctcagccttctgagaccctctgcaggagcagctgtcatccttgactgaaggattttaagagctctctttgtccatgtaggagtggcagggggtttactatgccagacggaaatccggggacagcatccaacagcacgtgaagatcaccccagtgattggccaaggagggtgagagcaaactgttcaactcttttagctgragataaagactcaaggccctcatgggcattgggcttgaaatgccagtatgagccttacatccacaaatgcagtagggttgtgctgaatgtagtatagatcgagggtgcttccactcagccggcagcaacccccaaacatggttttccatgtcttttatgaagcatcaccccaacctcccacctccacctgatcacctatgccttctgtcattcccagtgtgctctaaaggggcttgatttctgggcttccctttccccataacaacaatgatctcctgctggtgctctctggcctctgcactcagtgcatagggagccaaccttttctcctgcttgaggccctcgctccatgctggttcctccaggccggttctggacttgttccttggaggcccactgtttatggagagaaaggtgtgtctgaccaggagctgagggcatctcaatccactgaatctcagattaccagagaagcttctctcttttgtggagagataagaaaaatatgcaattcctcttccttcctccagttaaattttgtgagatttacaaagccaaacaggaccccctaaccatacatcatggtragccgtggggagccagcctgaaggtcaacaccaggttcatagcttgggtgtataaggaacacracgttgtgtgacatgtcagaaaaagatgaggccacagtcwtcctgccagkaactggaacaggagccccacctgtgactcttaggactacctgagttccttgcaaattgttgtatgaatagaaaacgagatgtttcataaaatcagccaggtatttgtaatagcttgtttcccctccaattttggttagtttcaaaattgctctcccatcaattcaggctacgtcccgtcaataccacctggtatttcatgccattttgtaatttgaagctccctttttgcttcactctggatgatgggggcactgacaggcccctgaccgaggttgtgagctggagagaggctgcccctcggccctcctcctgagcagcctggcckcagcgtggccattctcacccacaggcagtgctgagaactgtggggtggagatgatgcccgtgactgtcacattgtttttatcctcatccttataccatctcctcagaaaatcaaagctaagaatccctttctgtgtgtgtgaccagaatcattaggcaaccaaagcagaggagacatgctattgcctggtaatttccaacagaatacacttttctggtctctctgattttacagataagaaaaagaagttcttttgtccagacacaatttccagtgttattttccctgtaattgtaggcagtgagctatcagagrcaattcttattaaaagtagggaaattttacctcttcctagttgggtgaagtttattacagagtaaccagtattttatatcctcttttcagaggcctacagagaaaagtgaaccaggtaaagagagagagagagtgggataccccacgggcttctgggggcaaaaaacctaatgtaactctctggatttcatggttttactctcagtaaaatattgactgtgagctgatttttgcatggggctgaggcacctgtcatcttttgcccggttttccttgtgacagtgataaagagtgaggctgcccactgagtttcaggacccagtccatgacgttgaaatgagaggatttttatctgcctgagaagtgccattattatgacaattatagtgtgaaagaatatgggatatttaatataaaaacagcagccatgaaatgtggtcattgtccaaatgaatcttttgtagctatgcaattattagtatcagcagaattaaaactaatttatttgtagcagcattttatcctatcaactgaagatatctaggaaccaaactttaggagtcagttacaaaataacatacccattagggaagtgtttctgagccctctaggatgtataaaggaggcccagtttccaaaggcatgtgtgggctctgtgtgaaaactgtgttttctgtagattgagtcttgcttgaattttaaaactgccctaggacgaaccctggagtttagctttaagaagtctgttgacatttttatttgctgatttgttgaatcatctcatatctgactcactaataactgattatttgttattaggaaaattaggcattttgtctcgctcaagaaactgtgttgtaccactgacaataataagcaggtatggtattagctcacttcgtttgctctgtctgtttggccatgcgtcacctctgttctctgcttatctcaccactgttctctgcttgtctttctccatgtctaattgtagctgccaattaagcagatttatgggaaaatktggttcctctgacaaatctttttatttcccagcaaacctatatcactttatttgtagtgcacatcrgttatgatttagcttgtggctgaggawctctctagactaatatatgaaggcataaaatttttcctccaaataaaaaatgttctatttttatcttaatttcttaatcagttggaaagtatatatccatttgagcattgcacccctacaaattcatatcaaaaacaagaatcattccaaattagtactgcaattttttcttacccttacatcatacagaagaatacatctggatgttatcatctgcagtaacagaattttaagaagccactttatttaagaactttttaaggtaattttgtaatggagggcaacattggtgtaggtattttttctatttgattagtacttttactactggattatgtgtattttcacttcatgcattgtaatttgtagattaacaattatacaacaaacataattatcagtgatctatttttgaaaacttacaacatgtggtctttgatttttatgaggattttaaagagggacagtatctctaaaggatttcaagggcttctgtggcataatccattttagtagaggatggcagagatgtgtgaagtgctggatgagaaggtgaagcccagccaggcctggagatcaactggaaccagcaggacgtgagtagacagtggggtgagcccagtgagcccgtgagggtcttcagtcggttgtctcaggatatcaaaggggtccacgtccatgtgctcctttataagatatagttggagataaagtccttcctccagcactgagaatctcatctgaaatcaggatgttttcacataataccatgaagtcatgcaagaggcaagtccttggagacctctggtaaaggaaagaatggcctttcatagggaaaaaaaagggttccaacagacattttgctacataccaggagaaagaatgagttcttcataagagctgacgcaggcagaaagagagggacaggacacctggtgtctctttcgagacaaacttctgaacacaagcagtgcagaccaacatttcttggctgtggatccacagtagaggacacaggtccactggggttcattcattctcatgccagaaattgaccaagcacagttcatgtccagttcatgcctttcccccaccaactcagccttgctcctcttccttaccttctttctcacttaatgacagggacccctactctccctgtcaccagtctccctgcaactccatgtgcccaagtcctaccagtccttcatgacccagtgcaagaaacattaagtatcaccttctttctgaaggcccctgaggtaccctctttgctttgtatcacccaccaaccaccgccatcatcttcacagctatttgcgtgctaaactgccctctcccctctagcagggccactggtctgtgctgtccttgtgtgcccacactgcctggcatgtagtaggccctcaagctggtggctagcgttaatgaaactgaatgtctcagtcctggcctcctgccagctgtaaagccctcctgcctcacagggagagcaggcaagcccttagcacaggactttaggatacaggggtggggggccacctgctttttttctgaggctctaagtagaaacgcctttactaccatgaattagctgctgctcctagaaaagaggaaatgcagagctcggataccctgagccattgacgtcacctaatggtactgcacaggcctggagagacatttagattttctaataacaaagcatttttatacctctggctaactacagtgtttttcctcttcatcgaaggaggctgcagcgaatggcaatgggatctgtgctggggagggcayctgtctgcaggcggttccggtggtgtggttttctggggtttagccctgatgtcaaaatcggcccatgggtttgcattttaacaaggtgtgacgtggtaagccaggctgctctctcctggtaaggcttgccgtcagcaaagatcccttttcctgtatgagccctgtagctttttgccaagaggctggaaatgctcagtgaggtttgtctgttgtcttcctctcctctgcacacacactttctccccaaatatgtgttaaacacctgttctgtgctggcaccagggacacaatgcatctgcccccaatgtcagggaggccacagacaggtaaacagaataaatagaatgcagcacagaggaaatgtgaatcaagcactggagragctcaaaacccaggacctaaggaggctgtctgggatttttagctattgtgtaaaataggggccaagaaactagagcctgcaggccaaatatggcctgttctgtaaataaagttttattggaacacagccacactctctagtgtgttgcacctctggctgctttcatactgtggtggcagagctgaggccatgtggcctgcagagcttaaatatttaccctctggtcctgcacagaaaaaggttgctgacttcatttcttgaagataattttctttcttggatgttccattttcttaggccagcaacagtctgccctgacctcccagaagtaccccttctccccttcatacacttctttgggcaccttttgccttcgtgctagcctctgcgtcctgtctcaaagcctatctcagcccctgcatactggtgcggacacgagaacctaggtcccctgaggctttttccttttcacaaggacaaaatccaaatgcaaattcatggctcaracttcagaatttcaaggatctgcaaccatggtccaagagtcatattgcatagggaaaaaaggaggcagttagggccctgacattatatctgctcttgtgtcttgttttgttttgttttgtttgagacagagtctcactctgttgcccaggctggaatgcagtggcacgatctcagctcactgcaacctccgcctcctgggttcaagtgattctcctgcctcagcctcccaagtaactgggattataggtttgcgccacagtgcctggctaatttttgtattttttgtggagatagggtttcaccatgttggccaggctggtcttgaactcctgacctcaggtgatccacctgcctcagcctcccgaagtgctgggattacaggtgtgagccaacacacccagccatcagctcttattcttgttacatttttaatgtggctactagaagttttaaattacacatgtggtttgcatgtgtggctcacacaatatttttattggacagacctggtctggactttccctmccctgccaaatcctatcacagattcacctcacttgcccttttgcaggtgacgggatgctaatgagctacagacttcctctcgtttctagcaatgagtcagctccagactcactgagcctccaggaaaagatastgtaaccagtttcccaggcccctaggaggcttttaccctcactagaggacattctgatgggtgcttaagcaaacctatagagaatgtctttgcggggagatgcagggcccctttcaatcattctcaaactgctgcagaaagttaggtctcactttctagagcttggtggacagtggggagtaccatgtcctactgagtgtactcaggcaaggggacaccacagccctcagaaaactaagcagaagtgggatgcatgggagccagtgagggccagtggacagttaggcacagtcatcatccctgcttgtctgggcagcaaagtggggatggcttattctcaaagagaccacacatgcttagaaaccctttagccatgggttgagatgggtttcccaaccatgggttaaaggagatggtcagcctcccctaattaaaatgacctcctgcccttttgtgggaacagagcaaagctaccagttgacagctagtaarattttttttcctggcacagcctggcttcaccagcatgtcacagaggagactgccccacagttctcaccaggatctaggagcttctctmcaaacccagcaggtcctggatcatgggccttgtctgagatgtgtgcggtctgagtgtgaccaacaggctgctccaccaagcaccgttggtcgatttcttttttgcctcgtaggactgtgctcacagccccctgaacccacaaggacccaaggactcaaggactctgtagttgcttgtgcccagtactacaggaaagaggcaggctgacgccatctttcttttcttcctccctcttttgccttctctcttttatccacactctaccttcagtcaccttctgtaggcctccagacagtccacagattttcccatccagtccttacaccttcatggaccatcctctcaatgggtttctgctgcctrcaacccttggtggcccattctggttcccaccgccaggccagccttctcttgggtgtgtccttggccttcactgcccccatgcctttactctccccacatttgcccatttctgtttctctcatcccttacctttctaggggtggtgtggccgatgggccttctcatgatttggggccttctcctccagcttctggcaaaccatgatccttagcactaacagagtctaatatctcatggcattctcagcagaactgagagaagagggtggtgggggttctgttcattgctaagtagtgataaaaacaaaatttcaatttgtcctaaattcccagtacttggctcttttacatgcttttaaatagtgtggaccttttgttgcttccctgtcctttaggactcaactcagcttctcttccccccaggaaatcttccaaaccttccagcccatgtctctaccctgcaaagagggagcagggacactttttgtctgcaccacccattggatcattaatcttatgctgctttgggtgagttctcgccttagggcggggactgtgggttatgcctcttcgtacttcctcctatgtatgccccatagacatcaggaaattattttgaaaactagtttttactccttaacacaataacctttggatggcataggaaattaaagatgcaacttctgtcttatcccgaattcttattccatgtagagttgatctatatgtagccaatatatgtctcacatggtgttacaaagaatagtttctgtactcttccaaggcacacatccaagtgtgacttctttttttaaaaattggagaaaaaggctactgcaactgaaaacatgactgcagttatctctaaaagcagctagtcacagaaatgtattttatgtaattggaatattactatgatacagactttgtacacgtgcaccttatttgtgtgccccaaaatatttattgacatatttggtaaagccacaaggtaaacaaaattatccaaatttttccatttagctttagtacgtatttacaagaatctatttaaagaaaggcctctgatattgcgaaaccacatttttttttcctgagaaaccacgtttggaacagccaacccccgagcagacatgaatggaatacctgctacacatcagggactgtgggaggctctgagggcacaagataagcaggggcttgcagccgggaggaggggacaggggtgggggtactgagaatccaggggtaggattctgtgtttgagaagtcttgacttagaggagggagagacaacttcacgcttggtggtgatggtggctgctggaggtgatcatgccaggctctgtgaagttccagagcatctgaagctgagagggggctctcttggcttgcgagggaaagggtaaaccgataacattctgggcatgtgcacctaccctgagcatgatgtgagaggaggctgcctagtttcaggtagacacaggtgccctttgccctggcagagaagsttaccctcatggccygcaggacagcaggctggggggtgtctgccctgcacggatggggttttttgacccgtctgttctctcattctatcctttctgctacatcaaggatgtttataaggcaatggatgtttgtttataaggtatccctatggtggggataagtgggaggtggagaatgggaaaatcagagggaaagaagctataggtctgagctggaaataaagtgtctccttgtgtgagaccagtaatgcctgctcaccagtaataaccagcttcagcagggacccccaccaccccacctcacccttagctgagcctcagtcctggaggcctaaacatagagaaaaaataatttgacttaagaaaagtaagatagactgccgggcgcggtggttcacgcctataatcccagcacttagggaggccaaggcaggcagatcacgaggtcaggagtttgagaccagcctgaccaacatggtgaaaccccgtctctacgaaaaatacaaaaattagccaggcgtggtgcacctgtaatcccagctacttgggaggctgaggcaggagaattgcttaaatccaggaggtggaggttgtagcaagccaagatcatgccgctgcactccagcctgggtgacacagcgagacttcatcgcaaaaaaaaaaaaaagaaagaaaagtaagataggtttggtaatggataatgaacagacatagctgagctatttcttaaaaattaatgttatctattcatctctaatgcattgaagaccactaggatttaaagaggagtattatgttggcgtttgggaggagggttttttcccgataagtttaactaaaattccaaagkttgcacttctacatgacttgtgtcattcagactattacaagattctgctcactcyggaggcttgtactaattaagcccaagagacttacagtaccttaggcctgacttctgttaaagttttacttaatataccaatttttaggccacttatgggtgttagcactctatggaaaattttctttttccaaagcaacagttggtggctgacttttcagaaggaattattcacctcacatgaaggaatcagtttctggcattttgctcaacctaaatcatccattcagtgagcatgcatgcctgctggcacttggcccagtggaagatacaggatggatgagactgaagtcactccttgcatctgctcttgctagaatagaatccctggcttggctaatgagacccccatttacccagtcacccccatcctaacctgggaaccacctttagcatccttgctttcctgagccccctgcatcctagaagccacttagttccaaaggtgatgtctttgaaacaactcttgactccatgcccacttcccaacccaccaccacttcctttaagccattrtgacctctcatcctacagagcctcatgaccactccctctgcctccttgtaatgtgtgctggagccagttcatactgacttgtgagaactgattgtttaattttctggtattttgtgatttagtgttaaaccagccattattaaaaattaaattatataagcatgcatttaagcaaattttatttgtaagaagtaataagtacttacattccatcccttcccaagcacataactatattttactatcatgtgtgctcttgacatttgtacgtctgttttatctgtattatggaaatgccagataaagctgtgccctgcacacatcttcccaactccacattcagtgacatcattctggcagctttaaacagccatgaagggagtatttttagatcaagaaaattggcaaactctacaaatcaggacctttttttaattgatttttctagacttaaaaaaatgatgaagaaaatgttaataatacaagataaacttaaatgtgtatcatgtctatagtagtttcattgtgaataacccaaaaatatcaagaatgattcccccagtatttacaaactattatttgattcaacaaagaagttcctcacatcactgacaaatgagtgaaatttctatgtacayctttgttatttgtctttcatcttacttttttttttttttttgacatggagtctcgctctattgcccaggctagagtgcagtggcgcgatctcggctcactgcaagctccgcctcccaggttcacgccattctcccgcctcagcctcccaagtagctgggactacaggcrcccgctacctcacccagctaattttttgtatttttagtagagatagggtttcactatgttggccaggatggtctcgatctcctgaccttgtgatccacccgcctcggcctcctaaagtgctgggattacaggcttgagccactgtgcctggccctcatcttactttttgatgtaagtgaaaatatcaactaacatttatgccaagactccactcattcattaactgtaaccataaattggctgctgatacaagaggtcaaaaaaaccagcaaaagcattttgtgggaatccattggctatatagactctacaaccaagagtgccttatatttgaatattgttttgaaattgtgtgttatacattctttgtattagggattgggaaatttatttcttaaagggccagatagtaaacattaggccttatggtctctgtcaaactgcttaactcaactctgccattgtaatgggaaagcagcaatagatgatatataaatgatgggcaaggctatgttctaatgaaattgtatttacagaaacaggtggccagtacatactgacttgygaaaactgattgtttgattttctggaattttgtgattcagttgttaaaccagccattattaaaaattaaattacataaacatgcaattaaacaaatgctatgtttaagaaataataagaacagcccatcccttcccaagcacattactatagttcactatcgtgttagtaatgtcaagagcatacatgatggtaagctatagtaatgtgctatgtggccatatgctaaattatggcctggaccgtaatttcctgacctccgctttatatcagtaaaatgtrtaataaacttatgttcggctatctttgctttttcagcaagctggtggttaaactcttagcagcatactgttgactactatcctatctggtccccagtcctcattgtgaagggctcagtggtggttcctcatcactgactaaaccatcatcaggcatctttgaggagcacgctcctgacttcctgccccgctttccctgccaccttcccaagtcacactaggctgtttgtagttctctggacatgccaggcttggccatgcctctgtgtgtcactccctctgtctagcatgctcttccttcctcctgtcctcctggaaaaatcttggtcccctgagccaggtcaggagccccctctgtgactgcccccggccacctctctcctcctccccgctgtggagtggatttggcactgaccacactatcactgctcagcctgaccagaccctccagggcagcatcatgtcttggtcgctgtgtccccatctcccactgatgctgctgaatgcacttagtaaagatttgatcagtggagctcatggaagagcctatgttttagtaatccaagtaagatgtctttcgtgttgacactttgtatctgttactctccaagtgcatttcatacattaactcctgcaatccttaccacaactccaggagggagatactaggctcccctttctacagatgaggaaactgaggcttgaagtggtcaagaagcctgtccaggcttcacatgggatgcgtgtggcagaaccaggattctaaccctaaagtagttagcaatatggaaataaaggaagcacaagtgtatcttcggagaattcataagagaaaggtttcccttgcttgggaagtgaggggatgacttcatagaggaggtgttgactgacgtgggtttgagcagtggatagaatatgtcattgtaggcctggtgcggtggcttatgtctgtaatcccagcactttgggaggccgaggtgggcggatcacgaggtcaggagttcgagaccagtctggccaacatggtgaaaacccatctctactaaaaatacaaaaagtagctgggcatggtggcgggtgcctgtaatcccagcttctcagaaggctgaggcaggagactcacttgaatccaggaggcggaggttgccgtgagccgagatcccaccattacactccagcctgggtgacagagcaagactccatcgcagaaaaaaaaaaaaaaaagaatatgtcattgtagggagagatcctctgcaaaagtgaaaaggcaacgaaaggcaggagaggagataatcaagcatggctggtcccctcaatgtgtagagtaggggagcttgagctgagggtacagttggtgcccagatgctcagctgcccacctggcttggcctggcttcctccacagtccataccctacctccaggtgcttcagggtccacagccaccccagtgggtgtttgggctgaagtagatcatgtcatgtggatgggcctgtttacgtgatgtgccatggaagggagtggcaggtgggcagcttggagtgaaaagctaagagagtgaggtagctaactgcatctgtacggagaatcctgggtctcttttatggaaaactggaggcccagacctgcgtagctccttgaaggccatgagagcacctcgtccaggagtgggcaaggttgggcatgcagtaatgtaaatggagtagtaaatgtcagctctgactgcagcatttcagttcagctttctaccacactttggaggtatgcagccaactgcacctaaaacccagccattgtaccacctgcttctttgtctataggaccctttatttctaacatggtcaaagcagtgttcatcacataagattagactcaagcgtctggatcttcgcttctgtggtgcctcatttaaataatttctaagaacaaaattccaagaggtatggtttcctctagtgccattgcttgaaaaagaagtgaggaggaggaagaatttgaagtgttcttccttccgcttctcaccctggtttgctgaaggctaggtttcctgggtgagatttcagagcccagctccaggaaactgaagaaagtatgcatttactcatcctgaccagctgcacctaaacccagaatcaccatgtaaggagtggcttcaacttttcctcattatttgttagtcaaacaagatggctgcaggatgggaggctgaacagctgcaacgtatgtactcgagggtctggggaggaagaaaagggccaggtctcagtgggtgccattagttctgcaagtgccttttgagcactttcatagcaaacacaaccctgaactatggcacgatgaagagaaagcacgggggagcctgctctcaagctgctttgggtctagtagaggtttgtgagaaggtttcagatcactggaactgttgaaaagagtttaagtctattcgcagagctttggcccacaagttacaaaggaaacaaaaggcagattcataagaagccagttgtaatccatagggaacactggacctgtctgatggcggaaatccctacaggaggaacgttcacatctacccactggtgctagggaacagcagctccttcagcacctgtgttcgatgaggaggagtgtggaagggctaacatagtggctcccaaccttggctgcacattggaatcacctggagaattatcaaagaaaacaacaacaacaaaaacagaggctctgatagattgggtctggggtgcagtctgggcatgaggatttctgagagcgccccaggggattctgatgtactgctgagggtgagaaccaccaaatttctgagtgaattagatctggcgcgatcatgttatattaggctagggagctttcctgctggatgtcttggagggggacaagactgatttgaccaaaaactcctgttagggcaggctgatagaaggatggcctttgtataattctcacaaggaagaccaggccactgtggaactgccaggggtagggaccatgccttcatcgtcrtcatcttatatctgtctcctaggtcctggcacacagaaaatatctattgaataaatacttgcatccaggcagagagaagccatggtgtttgggtagcagcagtggtttctgagagacaggggcctgtgtgtgcccttcctcaggctttgtcagggccagggagcttggagcatagcttgggcttccagagcagccagtggcccaagagaagtctgacctgggcaaagctgctctcctctctggactcagagagcactgtgatgatgtggctctscctgtcttgtcagccatgtttccagcacttagcatgaagcctggtgcacaggaggtgcttccgtaggggtagatgatgtgctgggcagtcagccctcttcctggaactggcttcaggcaccgaagctcctctatctgcagggcctgacctgaaggcactttacttcctgattacagtgagatttggggacaaatacaacaaaaattcattccacagtctacaccccaagccccattatctgattcagctgacaggtttttgggtttttttgttttttgtttttgtttttttcatgtctcttgcacattaatgttttatggtttgagatttgataggggaagtaatagtgtgagtgggatttatacagtttcctgctttaattgaaattagaaaaattcacccaacatcctttaggctatgagaactttggtttttttwaaaaaaaatcttcaatagatcatcgtccctgcgacgctgcaccaccaaaactccaagtcttgtttctctgcctgtcactactgggctctcaggagatgcagcaaacggctgccccctttagccacagaagcacagtgttctgggtaagcagttgaggggtaagatccaaagcatgtgccagtgtatcaccatggggtgagagtccagagacagcggttgttgagtaggccctggggtcggtcagctgtgccaagtggtccaggctcaggcaggggcagctttttgcattagagggcagatcaccactgctccactgctgtcaggggctcttcctctgtgcctaagaaccttggcgcctatgcttggggaactcactgctgtggaaatacagcctcgtgggtgtgtgggggtctgcctggcctgcagcagctccatgaggccagagcggggcctmtgtatgttctttcatcttctgatgaatgttgtccctcagagggaattgtctgaacagtggccccagagacatgttytatattaggaatttaaagtgacattaaaaactgcaacatctttaaaacatccaaccaaaggttctaggggcttcggggctctaggccttgctcctggatggcagccccccggtggccatcaagggcgctttggtccagatgtcccctggggcatctgtgcagagaatgtgcaaggtcaggcccaagtaggccctccagaggcagaagctgatgatgaccaagggggtccaggccccttggggcctctcaactcattagcttctatggggccaacagggtaaaactgttgggaaaatggacctttcaaaaattctttttagacaatgtggactgttatttgtaaacttagaaagaggagggtatgctaaaacattgttttctcaaaacacacagacacacacacacacacacacacacacaaatgtcttcacataaaaaggaaagggaagagaaacttcctcactgtcttcagaattcagttactccttcacagctgctgaaggtgagcagcgttgtgatgaattcctggggtacactctggttcctcttgattcagtggtggagagtgtagaagcagatgctgcagccagtgagtgtcgtcccttgtggagtggccagtgcagaagttatcccttccccttgtgtttgaactaatctggggctgaaagcatactttccagctagtcttcctggtgatgaccttgacctttgatctggaaataccaactggaagcctggggagttccttctctttttctctcttttttttttttttttttttgacagagtctcgctctgtcaccaggctggagtgcaggggcgcaatctcgactcactgcaacctccgactcccgggttcaagcgattctcctgcctcagcctcccaagtagctgggactacaggcacgcaccaccatgccctgctaatttttgtatttttagtagagatgaggtttcaccatgttggccaggatggtctcaatctcctgacctcatgatctgcctgccttggcctcccaaagtgctgagattacaggcgtgagccaccacgcctagctgggaagttctaccgttttctaaggcttccagcaacactgagtcacagacctgggtgagtcatctgcacttgcagcgttcttcacaaaagcccccaacttgttctcagtgctgaactggctcccctggccatctctctggcatgtgattgtcagggccaatgaggctggcatggcctttgtgactaatatgtccccatgtgagaataagagataagttggaaaacatttgattccctggagaagtcttaacccttggcctcccattttcagtagcagcatttagagaagaaagtgtaattttgtgtttggtctttcaaatccatctctcttattcctttggaagcatcttcactttctccagaatcactgtattaaagccattcctcctctcccaatccatcctgcacccccttccagattcatctccccaagataacacttgactcttttatttctgtcttaaaaacttacactgactccctgttgtgtataaggtctgtcttgctgacttaaagtcccagcccttgatcctttacccttcccgtgactcctgtggagcctgcactgtagaaggctcagcttcttacaccctgttactcctggctcctgatccccaggtatactgcatattcaaagggcaatctagaagtctggtccctctcatggaatgttcccttcacgatagcttactgtcctttcggagccctgctgcacttgctggctgcgtcacacagcccagcactcagccaagttttgtctcactacacaggtcatcccaggcagcattcagtatcttctccatcttgacctcttctttccccaagggccttacayggtgctaggtaggtgactaatacattcagactaaattagattacctgaaattattcataattaggttaccagcatcatgtcttataaatcaatcactagaaaggcacttacttgatgagctacacagaaggaataagacagcccctgttctattctactcttattaagtcaagtggacaatactcagatatatggaaacagaaagaaaagcaaagaggtgtggytagaccccatcttaaagacaaaagaaaaagaagaggctgggcgcagtggctcacgcctgtaatcccagcactttgggaggctgaagcaggtggatcacctgaggttaggagttcaagaccagcctggccaacatggtgaaaccctgtctctactaaaaatacaaaaattagctgggcgtggtggtgcaggcctgtaatccaagctattccagagactgaggcaggagaatagcttgaacctgggagacggaggttgcagtgagcygagatcatgccactgcactccagcctatgcgacagagcgagtccactgtctcaaaaaaaaaaaaaaaaaaaaaagaagagatagacataagagatgttttgatcaaaacattaaccagaatgtttttgaagtgaggtattgaagggtgagatggaaagaagaataaagaatggccccacctgagtagcagggcattgactgttccatraattccaaggtggaaggagtatcacagagccctgagygaaggtttctgctggacaagagaagcagggaggatgagggtgtgctggaccgaggtgacataagagccaacgtctggctagatatgcagagagaggaatccaaggagatccgaaatggcatgctgtatctgaaaataatgaagtgtaatacaataatattttattgagtgtttgttttgggacaggccctagactgtcttaaaggcatcgtctcaattaatcatcttatcaagcccataagatagtattatccttattcagcagatgaagaaactgatactcagagagcagttacacagctagcaaatgtgcaagcttggcatcatacctcgagaccactacacagcccttccctgtggtgcctttgaacaaatgttttcactggcacaggccactcacaacatgaagtacactcagccactttttgtaagtcatgggggaagcaaacattgtgaaaaagacacccagagctcaccctcagttcacattccagccaattttttctcaagcattttattgtgaaaattgtcaggcatacagcaaagttgaaagaattttacagtaaacacctgaataaccaccacctagattctaccgttaacattttactatatttgcattatcacatctctttaaatatacatccctctgtacatccttaatccatcttgtttttttaaaataaatttcatctattagtacttttcctcctaaagcctttagcgtgcatatcattagcaacagttctatatctgcttacattttatgtaaaattaacatacaaagaaatgcacaaatggtaagtgtacctttgtgtgacctttgacaaatgtatacacctttgtaacctaaaccctaagaagacgtagaacatcactgccactccagagaaggtccttcttcctcttcccaattaatgtctgtcccccagtcctcagaagaaaccattgagctgattttatccaccatagattagttttgcctgttctagaatttcatctaaatggagtcacagtatttactcattcgtggaaggcttctttcagtcaatataatgtttttgagatgtatttatggttttgagtatatgatttggttgctttttactgctgagcactgttctattgcatggatataccacagtttgtttatccattctcccattgatgggcacctagattggtgccagtcttgagctattatgaataaagctgctgtgaatattcttatacaagtctctttgtgaatatatatttttatttctcttgggaaaatacctaggagtagatttgctaagtcatggattaaatgtgtgtttacttttgtaagaaactgccagttctcccaaagtagtttttagcatttgacatcgccaagaacaatgtatgagggattcagttgctgcacatccttgccaacagttggtttgccagtctttacaattgtagccattttattaggtgtgcaggtcttaatttgcacttctctgatgactaataatgttgaacaatttttcgtgtgctattggtcttttttaaatgtcatcttttgtaaagtgtctactcaaatcctttgctattttaattgggttgttttattattgagttgtattagttctgcatatatcctgatgaatacatcagtctattactaggtgtatgttttgctcatatgtactttcactctgtgagtttcctattcatttaacagtatattttaagaagtttttagtttgatagtttaatttgttaatattttatgttcgttgttttctgtgacctacctaagaaaactttacctaccctcaagtcaggaagatattttgtattttcctttaaaaacttagtggttttacatttaggactatcatccatctagagttagtttttgtgtatggtgtcagatgggatcaagcttaatatttttccatttggatatctattattcaagcaccatttgttgaaaagactttcttttcttcattggattgttttgacatctttgtcaaaagtcaaatgagtatgtaatattgatctgtttctggactctgttctttgcattgatctattggtcaatctacatattgcatgctttcttaattactttatagtaagtctcaaagtcaggtaatgtaagttcttcaacttaacattgcatgatttggtattctatgtcctttcaatttctatataaattttagaattagcttgataatgtttcccccaaaagcctgctgagtttatttttaggattacattgatgctgtagatcaattggagagaattgatatttgatgatattgattcttccagtccatgatatggggtagttttatgtttgtttggatcttctttaatgtctctcagcaatgttaagtagttttcagtatagaagtcttgcatatctttgttaaatttatttcaaagtactttatgtttgctgatgttgtgacaaatggaattgatttctaagttcattttctaaatgtttgctgccagtacataaacatacaattgattttttgccgggtgcagtggctcacgcctgtaatcccaacactttgggaggccgaggttggcatatcacttcaggccaggagtttgagaccagcctagcaacatggcaaaaccccgtctctactaaaaatacaaaaattagccaggtatgatggtgcacacctgtaaatccagctactcaggaggctgaggcacaagaattgcttgaacccaggaggcagaggttacagtgagctgagattgtgccactgcactccagcctgggtgatagagtgagattctgtctcaaaacaacaacaacgacaacaacaacaacaaattgatttttaaaattagctttctacttgtgaacttgcttgatggatttgttagtttcagcagctgctttatagattgcttaggatgttatacacaaaaagtcatgtctttcacatctatttaggatggaatcttggtctgtagttatctgttttttggataatgtcttcatcagggtttgtatattaggattgtgctggcctattaaatgatcttgaaaatattccctccttctctattttccgaacaagtttatataagacaggtgttatcacttccttaaatgtatgatagaattcacctgtgaaggtatcgtggcctggaattttttatgcggaaagatttttcataagaagatcttttttcccctaaatataggaaagttcagtcttttctgtttttatgtccatacaggtgagttgtagttttcagagaatttgtccatttcatttaggctatcaaattttttggcaaaagtggatcataatatcctctcatcatccttttaatgtctgtagactttgtagtgtaaggccgggtgtcgtgsctcacgcctgtaatcccagctctttgggaggccgaggttaggagtttgagactcagcctgaccaacatggtgaaacaccgtctctgctaaaaatacaaaaattagctgggtgtagcggcgtgccgctataatcccagctactcaagaggctgaggcaggagaatcactttaacctgggaggaagaggttgcagtgagctgagattgcaccattgcactccagcctgggcgacagagtgagacttcatctcaaaaaaaaaaaaagaatttgtagtgtaacctctctttcatttctttatttgtgtttgtgtcctctctcttttttattgttctgtctaggtgagatttatcaacttggttgatctttttggagaaccaacttgtaggctttattacttttctctattgttaatctgttttctattttgttgctttctgttcttatccttattatttcctgcatctcttttactcagcttggtttagtttgctccttttttctagcttcttaggtagaacctcaggtcattattattattttctgacaatttcattgaggaataactgacatacattaaactgcacgtatttaaagcatacagtttgatgagctttgttgtatgtacacacccatgaagccatcaccacaatcaagataatgaacatatctatcaacatatccccaagagtttccttgggtccctttgtattctttccctcctgaccctccttgccctcctttatttccaagcaatcactgattactatagaataatttccattttctcgggttttatgtaaataaaattagagagtgtatactcctttttgtgacatctttcactaagcatactaattctgagattcacccatgctgttgcatttatcagtttattttcttattgtaatagctttattgaaatataatttacgtaccatacaatgtatccatttaaagtgtaccattcaatggattttagtggttcatttccttttattggtcaatattattctagtgcattagctatcctttttatcattataaaatgttcttctttatagctggtgatactattttttcgtttttttgagacggagttttgctcttgttgcgcaggctggagtgcaatggtgccatctcagctcactgcaacctctgcctcccaggttcaagcgattctcctgcctcagcctcccgagtagctgggatttacaggcatgcgccaccatgcccagctaattttgtgtttttagtagagactgggtttctccatgttggtcagtctggtctcgaactcccgacctcaggtgatccacctgcctcagcttccaaagtgctgggattacaggtgtgactcactgcacttggctgatactctctatcttgtaatgtatttgatttgatagtaatatagccattccagccttcttatgcttgtttgcatgatgtatcttttcccatccacttactttcaatctgtgtctattgaaggtatattttttatggagagtgtataattggcttttcattttttaatcaattcatatctgcctcttatttggaatgtttagtccactaacagctaatgtaattattgatatggttggattcaggtctaccattttaacatctgttttttttgttttatttttattttcttttatataggtattttagattatttgaacgatttttaaaagccattttatttatccattggttttttagttaaatctcttggcatttttaagtggttgtcctggggattactatatacatctttaactacacagtctacttagcctaatatggtaccaattcatgtgaaacataggaacttttgaaactggaagtccatttaccaccttcccttttatcctttatgttgcagttctcatacgttataaatcccataatacggttactgtttttgccttaaatgcatgtgttttaaagaaattaagagaaaatttaatctactatgtacccaagtatttgccattgaatcttgagcactgaagatcggtgagaaggcagcatacacgcttgttctgtccttcactctgtctctggctaatcctgtgcctttgggcaaatcccctaaggacttggcctcagctgtctccctctgtagcaggtcagtaggtgtctttgcctacagactacagacagaaccagatacacacacacacacacacacccaactctaggttctctaattcttgagaaattgcattgttaatgtggattttagacactgaaacagttcccagaggatacagctgtttttcccaggaaacttttacaatagctgccatatacgtgatggtgtagtcactgtgccattgcccctgatgtggacactaacgaagctctcagctgtgtttctaggacttctactggcagtttttgtgcgtcctgcccatccttctcttctgagatagacctcacctgcagcatcaaaaggagtagttttatctcttgagggagctccagggcccaagactgtgggaaccactgctgcttggaggcacaagatgaatcgccccaggcagggagggtcaggttagacagctgggccagtctaaactgttacctggacagaaccaaaactttggcaaaaagtatttaaattcctgctttcagacatgaatttcagctatgttttgctggcacattttcagcataatagtaccagaatctgccaaattgaaaagctaggagagaggacatcaaacttctctttgtttaaagtgagaataggtcccatggctgcatttgctgccacctgtgcccatctcccctccatcagccaggccaccccagaaagttaaatccctccttaatgtcctcctgcagctagcctgctatcacaaaatgccactcacagtccattcctaacggactcaggaaaagttccagtggtagtctagtaagtggcgctcagcgtgggcttgggtggcatttttatcgtgtctggaaggaaaaaactgctcatgtcacatgagatacatatactttaaaaaaattataaatgctgcttaattcatccattttgttgcccctttttagggtacaggagtgttaatactcactttgtgccttgatttctttttttttttttttttttttttttgagacggagttttgcccttgttgcccaggctggagtgcagtggtgcagtctcggctcaccgcaacctccgcctcccaggttcaagcsattctcctgcctccacctcctgcgtagctgggattacaggcatgtgccaccacgcctggctaattttgtatttttagtagagatgggatttctccatgtgccttcatttctagtggagcattcccaggccaaattaggtgaagggtctcatttcctaggatttcttcacaggtggcatccgtcctcagatgggctacctaggactagggatggctgcaggtttcaargagcgagtagcttgaatgtgtgattcaaggttatttagtatcaaatttgagaatgccccaaacttaccttttaactgctcgaccgcatggcaccaccttttgggaaatactgtctttgggcacttctgaactagttcrctgagagccagagctttatctcttgttctcagtcacatcccagtgcctagaaaattgcctagcacatagtatatgctcaacaaacacctgctgaatgaataatttcattgtgacagcactgtgtttgtcccttattagacagtaaatcctatgaatgcagggactgggacctaaccacctttgcctcacaggcccaataaatatttcttgagttgaattagaagttgaggttctaattagagatgcccttttttctcctgggggtaattgtttacaaaatgtaaacaaagttctaatgaacagcattttcagaaccttaggacacacagtgataaaactgttttacattcctctcgttattactaatttttccctgtgctgtcccctcgcctctgcactagctctcaagggacctgatttactaagctctgggcctgaggatcaattctatcttatgctaatcaagtgcaaatgaaggcctggtgtcattaagtagtttaatgactctctgttgagtgctagtgtaacaggggtggggaaatgttggatctctctcattctcttattctctggaccataatctaggaggcatgtgggtttacacagaaaagtgccatccgtcactgacaattctttaagaacaagaaactttaaacaaaatgaaatttctgtccctgtttatatgtaagtgtctgtcactgagcagcaaggggacacgggctggaggactgacagcataaaagtgaggagacaagtgtgctgcttgtgttagccgctcagcagagcaccccacatatgctcaacattgagcttcagaggaaaggaaactaaaatcaatcctgaaagagcaagcaatataaatgtcattgaatccagattctcaacaaacagaatacacctatgaaagagaaggcaaagagaaccagcatgatctgggccccattaggctaggctcgtgcttctcaaaggatggcaccggacctgcagcttcagcctcacctgggagcttgttaaacatgcagattcgtagtctcccacccaaacctgctgaaacaagtgatgggtgcagaacccagcaatgtggcttaacaagccttccaggtgattctgatataaagaccggcttaaaagccacgggctaatattgtctcatttgatcctcttagatcctaaaaagtagatgtgatgcttagttttaggtgtcaacttgactagcttaaaaaagatacccagaaaaagggtctatgcatcagatcctttaaaacagtaaaaccttgtttatgggaaggtgtttcccaaagagactggcatttgaatcagtggactgaatttgaatcagaggacaggaagatctgcactcaccaatgtgggcaggcaccagccaataagccaagggcttggatagaataaaaaggcagtggaagtgcaaatttgcccttgcttcttaagctgggacgttcatcatctccttcccctgacatcggtgctcccggctctcaggctttcagacttcgggacttatgctactgccttccctggttctcagacttgcagacatcgtatcatgggactcctcagccaccataatcatgtgagccaatttatataataaactcagctcgcttgctcgctctctccctctctctctacacacacacacacacacacacacacacacacacaaycccctgttggttctttgtctagagaatgctaatatagcaggtgttggtcgccatttaccaatgacgaaactgagacttagtaaagctctgtaagttccccaggtttatacaactagaaatgtaggtactggccgggcacggtggctcatgcctgtaatcccagtactttgggaggctgaggcgggtggatcatgagctcaagagatcgagaccatcctggccaacatggtgaaaccctgtctctactaaaaatacaaaaattagctgggtgtggtgctacacacctgtagtcccagctactcgggaggctgaggcaggagaatcgcttgaacccaggaggcagaggttgcagtgaactgagatcgcgccaccgcactccagcctggcgacagagcaagactccatctaaaaaaaaaaaaaaaaaaaaaaaaagggcatgtaccaaagatcttttctcaaaacctatggtcttttcactttattggtgtttctcaaactgtagtgtgtaattgaatcacctggagattaaatggcaaaatgtagattccaattcagtagtcagagagcttgmgagtcagtagttctaacaagcttcaggtgttgccaatgccgccggtacactgagcacaccttaaatacaaaggcttaatgtgttaatggggtgggccccagaactaaagtctcagcctcacctgagaactcttagatccaaatgcttggccccacccagacctactgagtcagcaactctggggatggggcctatcagttggttttaacaagcccttcaggtgattttgattcatgcataagtttgaaaactacaaatatatcatctttccatactagaaaactcagtattggccaagttatgaagtgtggtggttcttacattgtagatatttgaaagacattagagagaaactagacaagagaaaaaagataaaacatttaagcctgaatagtagcttgcattaagtgtttttctgtgagataaggacacataaatgattatcactgggctaaacaatgacagtacttctctgtaaaggctcttgcaaatatgtgtagaatgtagagccagtgggcacaagtactgggagctaagagaagttatgaccaagggacagtataatatctgaagatgtagacctggcattgcacaggaaaatgatgcttaaaatttttcaaagaaaatatatctaacagcagaagaagataaatctctgcttgtctggcatgcagaaaatgatctgggggaaaaaaacagcttgggatttttctttttaatcttgtgtaatcctagaaattcatatgcagtttcatctatatcaaaccaatgcatgttgctttgatataaataacattttaaattaccattaagataaaaggggagagatgctgttgcacttagtctgttagactcataaaatgtactgaagtggtatgataccaagtatcagaatcagcacccatgtatatttcttttctgtcttggtgctacagcatttggagaacttggaatacatgaaaacaaatgrcaacagcttgtgggtggctttgagagctatgtaaaggcagtcactgaggacaggggcccagagtgttgcaagaggtgttttgttccggtgtttaggagctgcttgggtgcggattttgagaagtgaatcttcaagtggtttttgaaaatagaaaagatctttgatctatgcatcagatccttttaatttcaagaaaatactcatcaaagttttttgagtaaagatgatcaaagacgttctgtactataccactcacactgtcatttcattacatgtaaatgaagggagggtctcaaatgactcagttcctgcgatcacatctctttatccagcattcagactccaattcatcaaagcagtcttgtcacaaacatgaaagcattcagttctgtcgtgaagttgcagatcaagaatgttcagtcttaaaagtgcttaataagtcaacgtttaaagctacagtgattatttaagtgaatagtacttttgttcatcttaaccaggttttttacccctttccataacattcaggggaatggaggatgagacaaaaacaaaacaatataattctgagtttgaaaaagtggatcaaaaatttcttccatcaaaacctgcattcttctatataaaatcaagaaacatttaaaaatcacttcctgtttcattgcaaatgtgtgtaagaatatgaacaatctttttgtttttaaaataacatctaccatttgtaccattccattgaatacaacaagaaaagtaacagactctgtcagaagctcaaggaaccaagttagggacaaaggtgcatttagatatttggcctccatttctcaccttcacaacaactctttgcctgtcagatttggcactatctgagcccatggatgtattttaaatggacatttctctcagcattttaccgtgaaacactgtaaattagtatttttagagacataactattaagtaaaatatataatggccaaattattaataacagtgttttcaccagagctatgaggcaaacagcctggtcaatctcaatctcttatggattcattttatattagcttttatacgccaggtactgtgttagcactgggtatacaaaggtaatcaagtgagacataacccctgcctacacagaacttatagatagacattattcaaataagtactgatttatgaactgttataaatacaataaggggaaagtccattgatagcatgtaacagaagggcttgaccttataagggagtaggatgggcaggaaatatccgggaagggttcccttggaaatcgtgtttgagctaagatctggaagacaaataggcagaggaaagactgtggactgggaagcttcccaagcagtggagctgcaagtacaaagactcggaggtgggaaagggcatgggagaacaagagggatggaaaggaagccaggatggcctgcaagctgagagctcagggcagagtggtggggatcagaggtgcacctggagagctggcagggaccaggccatgcagcagagcctcatagccagctygctgcctggaattgaccctaagaccaacgggawgtgggagttttaaacaggagaatgacaggattaaatacatagtttgcaagcttacactggctgatgagaatagactgggttgggcaggtattgccaagctcagatgaaagctgatggtacctgcgttctggtagtagagagacgcaagtgactttacaggattggatgatggactggctctggggaggagagagaaggaagcagcaaggatgacccctggcttgcatactgatatatctggtgatttaattgtgagttctgatgcctttgactttcagtaatgactcagacatttctaccaaatgctgtctaccttcccacggtgattctgaaatgggtgttgaaggaggcatccagtatttatttccttacttgtttgttattgtactgatcctggccttgactcattttagttgctaaaaagtctcatgattttttattttttgtttttgtttttttttaaataaaaggttgacatgaacacatcatactaagagggatgttttcatattgtttttagggttttctcctacaagagataggtttatgtcgcaaatgaatttaaattctataatttaaggtcatgggagaacttgggagcaggggaaggaggctagttcataaaatctatccatcataaattatataaatttaataaaaatcaatgttttaaatagttacctaagtaggtcttacacttggtagattgacagctgttatacacaattccctagttatggtttgaagcagtgtattatcttatgcccaggctcatagtagggtgtcccagggactgtgacatgacattaacctcactcctctgtttcaggctgttctgatttcgtcttgtttattttcataggttttgaaactacagttcagacttccaattttcagccatcaatccgtatactcagttgaacatacaattttcccaatactttattatgaaaatctttaaccatatagagttagaaggactgtaagtgaatacacatgtactcagtacctacattctgtaattagcatgttgcttgatcatataaccatctgtgtctccctgtagacatccagcagcccatctaatttctgacagatttccaactatcaaaaaaaaaagttgcatatatcagtatgtttcaccccttgtaacttcagcatgcacattattaactagagtttaayatttgttttcatctattctaaggtagaagttacatacagcaaaatacgtrcatcttaggcatagccttccgtgaggtttttaacttttttttaattatacttcaagttctggggtacatgtgcagaatgtgcagatttgttacataagtatacatgtgccatggtggtttcctgcacccatcaacccttcacattaggtatttctcctaatgctgtccctcccctaacccccaccccaccctccgacaggccccagtgtgtgatgtgtgatgttcccctcactgtgtccatgtgttctcattgttcaactcccacttatgagtgagaacatgtggtgtttggttgtctgttcttgtgttagtttgccaataatgatggtttccagcttcatgttcctgcagaggacatgaactcatcctttttttatggctgcatagtattccatggttcacatgtgtgccacattttctttatccagtctatcagtgatgggcatttgggttggttccaagtctttgctattgtgaacagtgccacaataaacatacgtatgcatgtgtctttatagcagcatgatttataatcctttgggtatatacccagtaatgggatggctgggtcaaatgatatttctggttctagatccttgaggaatcgccacactgtcttccacaatggttgaactagtttacagtcccaccaacagtgtaaaagtgttcctatttctccacatcctctccagcatctgttgtttcctgactttttgatgatggccactctaactggcatgagatgatatctcattgtggtttttatttgcatttctctaatgaccagtgatgatgagctttctttcatatgtttgttggctgcataaatgtcttcttttgagaagtgtctgttcatatccttcgcccacttgttgatggggttgtttgtttttttcttgtaaatttgtttaagttttgtagattctggatattagccctttgtcagatggatagattacaaaaattttctcccattctgtaggttgcctgttcactctgatggtttcttttgctgtgcagaagctctttaattagatcccatttgtcacttttggcttttgttgccattgtttttgactaaatggcttcactttcgactagtctgacttcatgattaaaacataccaagtgttttagtcatgaagtctttgcccatgcctatgtcatgaatggtattgcctaggttttcttccagggtttttatgcttctaggtcttacatttaagtctttaatccatcttgagttaatttttgtataaagtgtaaggaaggggtccagtttcagttttctgcatatggctagccagttttcccgacctcatttattaaataggaaatcttctccccattgcttgtttttgtcaggtttgtcaaagatcagatggttgtagatatgtagtgttatttatgaggcttctgttctgttccattggtctatatatctgttttggtaccagtatcatgctgttttggttactgtagccttgtagtatagtttgaagtcaggtagcatgatgcctccagctttgttatttttgtttaggattgtcttggctatgcgggctcttttttggttccatwtgaaatttaaagtagtgttttttccaattctatgaagaaagtcaatggtagcttgatgggaatagcattgaatctctaaattactatgggcagtatggccatttttcatgatattgattcttcctatccatgagtatggaatgtttttccatttgtttgtgtcctctcttatttccttgagcagtggtttgtagctctccttgaaaaggtccttcacatcccttgtaagttgtatttctaggtattttattctctttgtagcaatcgtgaatgggagttcactcatgatttggctctttctgttattggtgtataggaatgcttgtgatttttgcacattgattttgtatcctgagactttgctgaggttgcttatcagcttaaggagatttggggctgagacgatgggttttctaaatatacaatcatgtcatctgcagagaaaatttgacttcctcttttcctatttgaatacctttatttctttctcttgcctgattgcccttgccagaacttccaataccatgttgaataggcgtggtgagagagggcatccttgtcttgtgctggttttcaaagggaatgctttcagtttttgcccattcagtatgatattggctgtgggtttgtcataaatagctgttactattttgagatacgttcaatcaatacctagtttattgagagtttttagwgtgaaggcctgttgaattttgttgaaggccttttctgcatctattgaggtaatcatgtggtttttgtcattgtttctgtttatgtgatgggtcacagttattaatttgcgtatgtctaaccagccatgcatcccagggatgaagccaacctgatcgtggtggataagctttatgatgtgctgctggatttggcttgccagtattttattgaggattttcgcatcgctgttcatcagggatattggcctgaaattttctttttttgttgagtctctaccaggttttggtattgggatgatgctggcctcataaaatgagttagggaggagtccctctttttgtattgtttggaatagttttagaatgaatggtaccagctcctctttgtacctttggtagaatttgactgtgaatccttctgatcctggacttcttttggttggtaggctagtaattactgcctcaatttcaggacttgttattggtctattcagggattcaacttcttcctggtttagacttgggagggtgtatgtgtccaggaatttatctgtttcttctagattttctggtttatttgcgtagaggtatttataatattctctgatggtagtttgtatttctgtgggatccatggtgatacccctttatgattttttattgcatctatttgattcttctctcttttcttctttattagtctggctagtggtctattttgatcttttcaaaaatccagctcctggattcattgattttttttttttctttttaagggtttttcgtgtttctatcttcttcaattctgctctgatcttagttattccttgtcttctgctagcttttgaatttgtttgctcttctctagttcttttaattgtgatgttagggtgtctattttagatctttcctactttctcttgtgggcatttagtggtataaatttccctcaaacactgctttaaatgtgtcccagagattctggtacattgtgtctttgttctcattggtttaaaagaacatctttacttctgccttcatttcattatttacccagtagtcattcaggagcaggttgttcagttttcatgtagttgtgcggttttgagtgagtgaggttttttttttttttttttttttgagatggaatcttgcactgtcrcagtgcaatggcacgatctcagctcactgcaacctccgcctctcaggttcaagtgattctcctgcctcagcctcctgaggagctgggattacaggtgtgcatcaccatgcctggtcaatttttgtatttttagtagagacggggtttcactatgttggccaggcttgtctcaaactcctgaccttgttatccacctgccttggcatcccaaagggctgggattacaggcatgagccaccaagcctggccttgagtgagtttcttaatcctgagttctaatttcattgcactgtggtctgagagactgtttgttttgatttccattcttttgcatttgctgaggaatgttttacttccaattatgtggtcaattttggaataagtgtgatgtggtgctgagaggaatgtatattctgttgatttggggtggagagttctgtagatgtctattaggttcacttggtccagagctgagttcaagtcctgcatatccttgttaattttctgtcttgttgatctgtgtaatattgacagtggggcgttaaagtctcccactattattgtgtgggagtctaagtctctttgtaggtctctaagaacttgctttatgaatctgggtgctctgttgttgggtgtatatataattaggatagttagctcttcctgttgcattgatccctttaccattatgtaatggccttctttttctcttttgatctttgttggtttaaagtctgttttatcagagactaggattgcaacccctggtttttttgctttccatttgcttggtaaatatttctctatccctttattttgagcctatgtgtgtctttgcacatgagatgagtctcctgaatacagtatactgatgggtcttgactcttcatccaatttgccagtctgtgtcttttaattggggcatttggcccatttacatttaaaaaaggttaatattgttatgtgtgaatttgatcctgtcattatgatgctagctggttattttgcctgttagttgatgtagtttcttttttttttttttttttttttttttttgagacggagtctcgctctgtcgcccaggccggactgcggactgcagtggcgcaatctcggctcactgcaagctccrcttcccgggttcacgccattctcctgcctcagcctcccgagtagctgggactacaggcgcccgccaccgcgcccggctaattttttgtatttttagtagagacggggtttcaccttgttagccaggatggtctcgatctcctgacctcatgatccacccgcctcggccgatgtagtttctttatagtgtcgatggtctttacaatttggtatgtttttgcagtggctggtactggtttttcctttccatgtttagtgcttctttcaggagctcttgtaaggcaggcctggtgttgagaaaatctctcggtatttgcttgtctgtaaaggattttatttctccttcacttatgaagcttagtttggctggacatgaaattctgggttgaaaattcttttctttaagaatgttgaatattggtccccactctcttctagcttatagggtttctgcagagatatcygctgttactctaatgggcttccctttgtgggtaacccgacctttctcactggctgcccttaacattttttccttcatttcaaccttggtgaattcaccaattacatgtcttggggtgtcttggggttgctcttctcgaggagtatctttgtggtgttctctgtaattcctgaatttgaatgttggcctgtcttgctaggttggggaagttctcctggataatatcctgaagagtgttttccaacttggttccattctccccatcactttcaggtacaccagtcaaatgtaggtttggtcttttcacatagtcccatatttcttggaggccttgttcattccttttcattcttttttctctaatcttgtcttctagctttatttctttagttgatcttcaatctctgatatccttttttctgcttgatcaattcggctattgatacttgtgtatgcttcatgaagttctcgtgctgtgtttttcagctacatcaggtcatttatgttcttctctaaactggttattctagatagcaattcatctaaccttttttcaaggttcttagtttccttgcattgggttagaacatgctcctttagctcggaggagtttgttattacccaccttcggaagcctacttctgtcaattcgtcaaactcattctctgtccagttttgttcccttgctggcaaggagttgtgatcctttggaggagaagaggtgttctggtttttggaattttcagcctttttgcgctggtgtctccccatcttcatgtatttatctacctttggtctttcatgttggtgaccttcagatggagtctctgagtagacgtcctttttgttgatgttgatgctattcctgtctgttagttttccttctaacaggcccctctgctacaggtctcctggagtttgctggagatccactcccgacactgtttgcctgggtatcaccagtggaggctgcagaacagcaaagattgctccctgatccttcctctggaagcttcagcccaaaggggcaccagccagatgccagccagagctctcctgtatgaggtgtctgtcggcccctactgggaggtgtctcccagtcaggatacatgggggtcagggacacacttgaggaggcagtctgaccttagcagagcttgcacgctgtgctgggagatccgctgctctcctcagagctgtcaggccgggatgtttaagtctgctgaagctgtgcccacagctgcccyttccccaacatgctctgtcccagggagatgggggttttatctataagtccctgactgggaatgctgcctttttttcagagatggcctgcccagagaggaggaatctagagaggcagtctggccacagcggccttactgagctgcggtgggctccacccagttcgaacttcctggtggctttgtttacactatgagggtaaaaccacctactcaagtttcagcaatggcagatacccctccccacgccaagctcaagcatcccaagttgaccttagactactgtgccggcagcgagaatttcaggccagtggatctgagctttctgggctctgtggaggtgggacccgctgagccagaccacttggctccctggcttcagtctcctttccaggagagtgagtggttctttcactggtgttccaggcagcactagggtatgaaaaaaaaatcctgcatctagcttggtgtctgtccaaacggccgcccagttttgtgcttgaaacccagggtcctggtggcataggcaccagagggaatcccctggtctgcggattgcaaagactgtgggaagagtgctgtatctgggccggaatgtaccattcctcagggcacagtccctcatggcttcccttggataggggagggaattctccgaccacttgtgtttcccaggtgaggcaatgccccaccctgctttggctcaccctccgtgggctgcacccactgcccaaccagtcccaatgagatgaaccccgggtacctcagttggaaatacagaattcacctgccttctgcggcgatctctctggaagctgcagacgggagctgttcctatttggccctcttgtctgcaatcccttccttgagttttgacaaagcatataatactggaaccttatccccatcacgatattaaaccttgccgtcccaaaagtcccttcatgccccttcacagtctatctctgtccacccatcctgctcgcccccagaggtgaccacttttctgaattacttaaccatagattagagtttgagtgtatactgtcacggttggcttctctcactcataatgtttttgaggttcatcttcactgtatcattttttttccttkttattactgaatattcctttgcatcagtctatcgcagtgtggagaatctacttctgctgatggactccagggctgtttccagcttttggctgctttgaacattcttggacaagttttcttgtgaatatatgcttctgtttgccttgagtaaacacttaggagtgggactgttgggctgcgtagtaggtggatggctaattttaaaagaaactggcaggccttttttccaaagtggttgtacaattttatactccctccaactatgtatgagagttccagttgttccatagccttgacaaaacttctttttaattttagacattctggtgggtgtgtagataaataggatttttaaatgattaagagacaaatgaccctgaaatcatgcacacatacacacaaatacctaactcagaattaatagtgctttttagaaccaagcaaaatcagatgtttgtaaacaaagcatttagcacaaggacagcaaaatttgtggcaacttataatattttgaagtaattaagggtttgaaattatttttctccctgaaacaagctgtaagcctccaaggacttgctgaggaatcccagcttcgagctctggcaaagagcttcacaggccaaggagagcagtattcacattgcacaaactaagcactaaagccttcggtttccccagtaacacacaaaatcaaacttcccagtcactgctgcaaatgagaatattctacattttatgcttttacaagaggagaaacacaccacactacagagagactgactggcatggggcattgatgccattgaatccccgtccctttgctttgagttagtttgcacatgacaaaaccttttgataagagatactcacacgtccccccaaatttcaaggaaaactgtgtttcagagagatgtcccgcactaatgcagggggtgtttccttgaccccagtttaacaagcccggtcctggcacatcccttctggggcttcactgtaaacagcagcttgacagagcaaatggttttagagccaaagggacacatttgaaattggctctgcatactacctgtgtggcttgggcaagtttcttaacctcttaaacctcagcttccttgcctgttccaagcaatgaggatacctccccttgtgcaagagtgccatcatgattagactgcagatgtcatgctgccagcatgtgggaatacacgtaagagatggctgtggagcaaagttcatccccttggctgcctaccggagagaatgccaaaccacagacccactcattctgtatctattctcccaatgagctcaactaagtattaaggaaataattttagaataatttctactgaaatgactggtaagtgtagggtccacaagaaaattctgattctaggagaattttcatccaagtgaatcattagttgtacagtggggtatctggaagaggtacgtggataatcagagtcagcttcagtgaaaacccagcaccgctggggtgtgacaggggaaggtctgctggcactgctctcggcacagagcatcattaagtcggtcccacaatagggttcctgacggcagatgctgctgcagccaggaagagtctctgcttgtagagcaaggagttatctccatgctgggttgctagccataggcatgcagagagcccagcaaaggcaggtgagccagtctgggggtgtgttcagctcaaaatgccaaattatacttgaagaagaatggcccagagccacctcagcagatggaattggtacctgtcatccctgcttctccctgtacctagtggctggcatacatttccatccccaaagcaggatgtgcatgtgcacctgctggccttgggctttatctggctccactctagacagaacacaaaacccatgttgacatcgcaggagctccacgagccaatcggctggcccgaggggcagaggatacgcaagaaaggctttttgttgtgttttgtttgttttttgttttgtttttaaataacatagggagccatgggacacagcttctaaaggagrgaggcgttttgattcagaaagaaaagctaagcacttaaaaatcacttgtttttgtgttaaagctatttgaaagaacaatttgcaaggcaaaagttttattcatttggtatcatataaaaaattcacactatatcagtaagtagctgtatagcaaatggtctttatccctgaagaaaacatgaaacatgggaaataaaaatgtcccataattatgggataaatgagtcacagcccttagtcacattttgacaaggatatcacacaggttggtcatgtaattgtttccataattatgtggaatggactgagcagaagagttggtagaaaatcctattttcacgcttcagttttatgtgatgatttttcagtggttcagtcaagctgaaaccttttacctgtatctgtcatacagggtgttctgcagcggacaggcctatgcagacctaccccccaaagtctgaggaagctgagaggccaaagaaagagactgacaactctagttgtcagaaaggaacattaataaraacttaagaacagaagccctgtctgtgtctctggcagcagtgagacaagatggtagatctgtgcaccattacccccagacccagggcttatataccatacagaaagggtgattcagagggatgtgtaggacaactgaagtatgataacatcaaggttgtttgacctaatggcagtatttacagtaggtatgtgcttttacccaaggaacaatagataatttgggaatctttgaggccttctcagaactgaggttattcagaagacagcatggcagattagcatccaagatggagttgctttggcctccacactccagcctcccaaaaccagctcttaaaatctcatgcactcttcctcttctatgatggtctcttagcctgtagggagggtggctatagctttagtagcagtacattggcaatggaaaacagctcaggcccagtgggattccaaatgagggaggttcacaggctgttggaatcatctctagtcttaggaataccatgacttcagttttctcagaagaagtaagmcaatgagagatacttaacattaataatttgaatagtagaaatataatgacacttgaaagagaattcgtatgccagaacaacaacaacaaaaaaagcctattagccaactagaagaacattaaaacttggttcttctttagagacttgtagccaggaagtaattcaggtttagcccaaattgtaggcaaataataaaaactcaagaacagtatttcaggtccagttacagtggctcacgcctgtaatcccagcactttgggaggctgaagagggcagattgcttcagctcaggagttggagactagcttggccaacatgggaaaaccctgtctctactaaaaatacaaaaattagctgggtgtggtggcacatgcctgtaatcccagctactcgggtggctgaggcctgagaatagtttggacccgggaggcagaagttgcagtgagccaagtttgcacccactgctctccagcctggacgacagagtgagactgtctccaaaaaaaaaaaagaaagaaagaaaaagaaaaagagtggktaggactagaatctaagtttttctctctccagtttccccatttctaccaaggataaattatagtaccttgctatttcaggaataatgaaaaataaaaaataaaaaaattacaggaccaatttatttgctttagttgcaaaataaattttagtctcactatacttggcctaattatttgcttaaagtgtagcaagaatagttattagtcatataggcttcttttcaattggctttgctggaactttataaggaattttggatttgacattttaaaagccttgagactaaggattccccattagactatgcttgtaatacctatacataggtactatacctgtagaaattcctctcttctttagttcccaaaatatcttggttcctgggcctgtcagaaagtgatattctttacttaccagaggccgggaaccttgtaaggaaccatttagacaacgtaccaagttagtctttccaaaggactttttatcggctctataaagtcaatgtcaattcctcaaagcagtctggttatatctgaaaatacatgattctagtcaaagccttggtgaaataaccagtgtttccaattgtgtcctgttacaaaacaaaacagattcttactgaatttatgcaaacaactacattgccataaagtaagaatactcatgaaaagtttccaaattctggagaactcaggtagagggaagaagtaaattttgctcacaaaagtatcctttacaatcagagtagcagtcttccaaacaggatgttgcccgttcatcatggaacggccatccacaaaccaagcagctcttagtcaggtgagggagctgtttgtcaggcactgtagaatccagcagctcctcacacagtttcagagtcagtcctagggaaaaaagaggctctctgctcatgagtatctcctcctcgcactcttcaggtagcaagatcctatataaaccatttccattttatcatgggactctttttgggcactgtgatccccatcagagtgtttctctgacattacccccatatgccctagtaaatgattcactaagggctgtcaagtgaagaatttatccctacaagcactctggcatgctacattctgtgggctcaggcagtcttattcccatttagcatatccaattaatattgctcaaagggcagatttgcatgccttctcttctgtagtactaggtaggaaaaatgtttcagcagtcagatataatatccattttcataaaacatttaaggaaaagagatataactatttcacataaagactatttaaacatttcaactttcataattccatcagcccttacatttttatgttctgcttccaggaacttctcttttgcacccctagaccattttaccctcttgtcaaaaaggctttggctttgcagcaggggattgagccaagggacctgggcactttggtcaatgtgtcttgattaattacctcaacattgccccaggcaattgttgatcacctttctcattttaatctttaccttttgatttttcaaaaaaatattttccaatctagggtaaatacagaaaactggtttgggttcctgtaatgttgggggaaaagcaggggctcaccatggtccatccagcttttggtagtgttgtattaagaactttgtttgaaccctatcaatttccaattcattcaatttcttttttgagacagagtctcactctgtcacccaggctggagtgcagtggcgcgatctcggcacactgcaagctccgcctcccgggttcacgccattctcctgcctcagcctcccaagtagctgggactacaggcacccgccaccacacccggctactttttgtatttttagtagagagggggtttcactgtgttagccaggatggtctcaatctcctgacctcatgatccgcccgcctcagcctcccaaagtgctgggattataggcgtgagccaccgygcccggccaattcaatttattttttatttatttatttttttgagacggagtctccctctgtcgcccaggccagagtgcagtggtgctatcttggctcactgcaagctccgcctcccgggttcacgctattctcctgcctaagcctctccagtagctgggactacaggcgcccgccaccgctcccggctaattttttgtgtttttagtagagatggggtttcaccgtgttagccaggatggtctcgatctcctgacctcgtgatccgcccgcctcggcctttcaaagtgctgggattacaggcgtgagccaccgcgcccgaccttcagtttcttaataaccaagatttccaccctgctgggacaaattccatgactctccctttctgtttttcttagtttcaaccctttcaatttttaaaaatttaccttttaaaataacttttaaaattttcacctcgctaggataagtcctttgactctccgttttgccattccctatgctcttgttaattagcctaatgtttttattagcatctgtaagacccatgaggggaagttgagacagcaaatttgaggcttcctgaacttttaatttttcatcagtaacgaagtgcccacgcaaaagtccctcctaccccacccccaccccctcaccagacacacacatgcttaaccacagcatttaccatgacctgggtaataggcatattgatggggtggctatccctgtcataaagccagttccacatggcttatagacaaagcatatcagctgcttcatctggggtgctccacgtagcattggggccgaccccattctcagggtaaacagatctgacagaggcttttatccagtccaccaggctggctgttccytcaggaataacctcccatgtgtctggatcacatatagccatctgtgattgttcagtagtgagctggggatcgtgcatcaacccaaacatgttttaccactctgcagcatttaaaaccaaagacactgctccaaattagctactttcacaattcaacaamaggttttatccagggagctgatgatgcctatctacaaaagggaacaattccttcacacagtaccctctggtttcagcagttacttgggttttgcccttcccccacattgactaccttcttggcaaccacaggtctcagaggtactttctgttgccctgtcattattttcccctttgtagatagctttgaggctaatgatctgagctcagacagacccacatttgagcttggtgcagcctcaaggcccaatctggcactcttattttagcttttatagaaaataaccaaggtactgaatatttcacttttccttattggtttgcatttacttatgtatccagtgaacaactccttaggagttggatttttctctaaattccactggtaactcttaccttttagtaactgagcacagcacagctacagctccataccataggtgaccacgtggccgyccaggaatcaatcaaaagttcctcattctctatccttttatcctttccctttctatccatctagttttatctgtatcatttttcattcattttaaaacaacctttaaatagcctctaaactatgtggttactcttcctttaggcaaaaacctcatcttcatgtttttaataaacttctttatcaaaacacatctttctttcttcactttcatgtagaattgtttctcttatatttagtagttttaattacatatattaactactactttaactcktagtaaccctaatttccatggaaaaacctaggattacttaatttaacataacagattttaagatttcaaattactgaaaagaactttgaaactagttttatttgaaagattactaaagttaggtgaactaaaaggcatttgagttggtttctatatttccgataagaaattttttttttttttttttttttttgaggcagagtctcactgtgttacccaggctggagtacagtggcatgatctcggctcactgtaacctctgcctcctgggttcaagcagttctgtctcagcctcccgagtagcggggactacaggtgcacaccaccctgcctggctaatttttgtatttttggtagagacagggtttcaccatatttgttaggctggtctcgaactcctgacctcaggtgattcacctgacttggcctcccaaagtgctgggattacaggagtgagccactgtgcccagccagaacttactttttctttaagccaaattagagctctgtcatatattttggtaatgatgtatcacatatataacatactaaatatatatagacatacacacaaacagaagcagctcttatagacttataagattcttcatttgccagttctcaaatagcttctctcccacctttacacaacccacccaaagacatgactcagatgaaacaaggtggagaagatctacatctctaaggcacagaacttagacctaaacagcattatctggaaacaagattgccaggaaaaatgtcttctcttcaacttagcttgtttcttacattactggcttcaaggtgtcagtatattcttatattactggctttaaggaacagggccaagaaagcatggaagttttagggcctaaaccacacaattcttatccaaacatgccaagaaatgagtagcccttatagtagtaaccacttgctttaacaactgctgtcggccacctctaacaatatagctgttgcccgtgactgctagccattaggtacaaggtcagcaactctcacagtaaaaagtaatctctgtaccccaccccccgcctccccacacactaaccagagatgagataacacaatacaaaagagtgcagttttagacctgagtagaatctgtctgcttactacccttgggtttcatgaggaaaaagagattcttccctaaaagaggagtctttgatgccgtctgttttccccaagggatcccaggctgttggaaattccttttttttagatccctcgtgtggcaagaagtagtaggaacagacagaagtaaatggagaaacagaatttggtcagaagttttacagagagtgcagaggccttaatacatatgtaaacatatacagcccaaatttcagttttaactaagtttacttttgactgtagggcccttaaaaaaaaaaaacctttttcctaattgtaattcctaatcaagctgttttacttttttttttttgaaatggagtctcactctgttgcccaggctggagtgcagtggcacaatctctgctcactgcaacctctgcctcctggattcaagcaattctcctgcctcagcctcctgagcaagctgggactacaggcgcccgccaccccacccagctaatattatatttttagtagagagggggtttcaccatgttggctaggctggtcttgaactcctgacctgaagtgatcacccrctttggcctcccaaagtgctgggattacaggagtgagccacggcgcccgaccggctgttttacttttgtgtctgctgctggctggctcccgctaagacacagtcatcttaccgcactggctgcctgctgcccttccgggccacagtgtgatggttggcrctcagttcaccgtcactctaaacccgctggcatttggggtcatccccacactcacggggtggtccacaatcatctgaartgtgagccacaccattccacatagaagtggctgcccaccacaagatttcctccattttttggtctctcagctcctggcctggcttaccacacgtcagagtgggcaggcctgtgcacacctaccccaaagtccgagraagctgagaggccaaagaaagaggctgatgaatcccgttcctyggaatgaaacatctaataggaacttatgaacagaagccacgtctgtgccttggatggtggcaagacaagataacggatccctgttccattacccacagacccagcacttacataccagaggaaaggaatgtgtaggacacttgcagagaaaggcaagaatgctatgtgaatctgcctaagggcaggatttatggtcaaggttgttttgatgtaagggcaggatttacggtaagtacatgctcttcttacacaaggaacagtagataaaatagtaatattggaggccatcccggaactggggttaatcagaagtcaacatggtggattagcatccaacatggagttgctttggcctccgcagacagggtttctggctattacagttgatgttgctaagccatattaatctgcctctgcagatgtcctacacactcatctgtcttatttttcaagttaacctaccccattcattgagtggctacaaagatttaatggtctgagcacttgaaagtaggtkgatttagcagtgaagccgcatgattataagtttaatagaactaaatgtgccccactaacagtgttggggtcagttataaaacaagaaatgcaggatcccaaagaaagcacacttattatttctagtgctaatgacttccttttgtcayttgacagacatttattgagcattagcacaaaaccattaacaacaaaaaaaattgataatgagaargaataggtggaaaactgcatctaaagttcagatctcatcgtgagaaaacattttataaattgtctataattgagcatttgaagagctttgtaggaaatgtttttaactcctaggcttaaattcagattattctgtagcacagaaaaattttataaygtatctgaaacaaacaggttatatgttagccttataaataacttaaatttagttatatcttttatctttctgcatttctgtaggctgtcaaaatgagacagtagctgactggagaagtagatgtcctgtctagagagtatgtgccttgggtaccttcctgctctcaggctcagccattctataagtgtctgaaagtaacagagcctttggattagtaccacttggtgtatgtctttcatctgttcatattatatgtgcagcttcttgctttcttcaagtcttcagagctttttaactaaattgtttgatgagaaatatagcaaatggcatatttaaaatctttctcttgttttatcaaacttttgaacgactttagattcacaagattcatcgtgattcaggagacaattctcagacaggtgagaatacttcaattgaactctaacatacttaggaggcagctgtgggttcaaatgtatacatttctctgaagaagtctaagttgacatctactaccccagaatgtggagtgctaaaatccacgtgctcatatcacaaggttggcaagccagaagaaaagcagaaatcccttaaaatgtccttgaatcttcctttatggcaaccttatcatactgaaygccctccccatcttgtttttcttttcttggctagataccatgtaggacagataaacccaagagagtgggccgaaagtctaggggagacactggttgaatatgacacaggtgacaatatggtagttgctcaaccgtgtccagtctcccttttctttgcactaattggtgactgtacagttggaaaatgtggctaggtcctggcctgggaggcagaagcaccaagttcctatttcagtttcctactcgctcatttcatatgttgggcaagactctgcttggttcttggcttcctccataaaaagaggagctggacctgatgacttctacaagtggaaaggtctggaattctctgaccattagagggaaaaaaaatcagtctgctaccaagaagttaagatttttgtgcctgcaagaattgcaacattctttgccctgttggtggctttcccagccactaatgcatgatgtcagaccctaggctaagtgtttagtctctcttcttggtgaggtggatcatatctagcatacttagaaagatgtcatttgctctttctaagcttcaaattttttcatttgtaaaatgaattaacaaaagcccatctcattgttaatgaggattaaagaaggaaatgtataatgcttagcagtaactggcatttaacttgtaccttccttccccctttctgaaaactttctagacatgaacaggctgggataacataatgacacttcacacacaggtgcattttctctctctccctcactcacacacatacattttagttaatttcttgtaacacctgagcaggggtattattttaactaacttgggagcttctgggtgccacaaattgttccaagcatttttgtgtcctttgcagtgcccagcattgccttgtacataatagacactttgcaaatactcagcaaatattggtaaattgaaaccattccatcttggaagtacagtttccaccatttattctctttttgatcttgggctacctacaaaatctctccatgcttaaatttcttatcagtaaaatggggatagccctatgtagttttgagaattgttgtaatgattgaatgagacaattatttaaagtacatagcacaatgcctgtcacaaagtaggcactcagtaagtggagctatttttttttttcaattggtggcacatattcctttttgccacagagtacagctgtttaaatgtcctttatcctttctctggcttaagtttctaattcatgtaaacatctgttgaaagaatgacaatgaattctttaattatgtggccttactttagcctttattgaagaataatttctctaaacttttaatcacttctattgctatagattctcttaattttaactgagataaaatgaggaagaataaacatcatccatctttgaataatttctaatgaacgacttagaattcaaccagctagcctgggccacagccttgaagctaacctctcttttagttttgtttagaaactacattttgaggaattcttggttcttgaatcttgaatttaatcttaaatttttaagttagatttaacttattacttggtacacaaataaatgctaggactgtatatgattatgaggtccctgaataggctaaaccaagtgtctcacaagtgagcagtattagtttcgtttctcagggattcagaaatgccatgatcccaacaatatcacttaaagtactattatttatagataattgtaaaaatatatatatatagaaacttatatgcaaggataggtaaactactaaggtagaatttggaagataaaaattaggaaaagagatagtataataaatattttaagttagattatttaagataaggtgctatagctatggtgttcagattaactttataatagttccgctttcacttcatgttgtataaaaataattcagttttaatttttgatttaataatttttttagttgaatcaggtttttaggacactaaagtaaatggttaagaaggtggtctagaaaagtgtctaagacattataaagtgaaaacagtaagtagtagaacaatgtaacatgatcacatgtgtctaaagacatatatgcaaatgaacggatgtaattaatagcccccatatactacatgctcactatgtggcagacactgttctaaatgctatgcatatattaactcacttatttctcaaaacagcctataaatgagatgctatcattacccccacttcataracaaggataatgagacccagagaagttaagtaacatttccaagattacacagctgctgagtggcacagtagaaatttgaatcttgacgatttggctctggacctggtttccttaactactaggcttcttgcacctgctgtcactaggcaattcttaaagaagtgttattgcatcttttttttattcttggaatatgatcacttattggcatctgagaagcgcattcttcctgctgaaatttgcatgtctgcctcctctcttagcctagtgaggagtaatctgtgttatggttaaatttctctactcgcttatgagttactctcacagaagcaaatgcgctgaaaatgtgtgtttctgaagccaacactgctgccttgtcattttttatatctcggcgctcactggtggcatatgctttttgttagtttttacattaacatgaccgtgcgttttcagtgttaaattcaagtctgcaaagatttaggccaaaattctttaaatgtttgcctgcccccaccaccctggaaaatagggacaagggtgaaggtttagttattgaaatgttgggggaatctaaaactgttttcttcctttcctgtgatcagcagtatgcatcatttgatgaaatccatccttaaagagaatctagaagcccatctagaggtctgacttttcagaggtgccaaaattcgtctgaattaatctcgtaatttaaatctctataagtttcattagtattatatttcctcaaatatccccatttaaaagccttccctatccagttgaatatattgtctttcaagtaaagatttaaagtactattatttatagataattttaaaaatatatattgaaacttttatgcatgataggaaaattactaaggaagataaaaattaggaaaagagatagtataataaatattttaagctagattatttaagataaggtgctatagctatggtrttcagattaactttataatagttccacctttactagttcaatagttcccccgagaatgtccctcaagttttaatgtttattttcttaaattctttttttttttggagacagagtttcactctttttgcccaggctggagtgcaatggcacaatctcagctcactgcaacctctgcctcccaggttcaagcgatcctcctgcctcagcctcccaagtagctgggattacaggcatgcaccaccatgcctggctaattttttgttkgtttttttgagacagtctcgctctgtcacccaggctggagtgcagtggcacgatcttggctcattgcatgcaacctctgcgtgctgggttcaagcgagtctcctgcctcagcctcctgggtagctgggattacaggcatgctcaaccatgcccggctaatttttgtatttttagtagagatggggtttcaccatgttggtcagggtgrtctcgaactcctgacttcgtgatctgcccgtctcagcctcccaaagtgctggacttataggcatgagccactgtgcccagcctaattttatgtatttttttagtagagacagggtttctccatgttggtcaggctggtctcgaaacctgacctcaggtgatccacccgcctgcctcagcctcccaaagtgctgggattacaggtgtgaggccctgcgcccggcctaatgtttattttcaaaattacattcatgtaactaaataacccttgatactaagctatattactatgatataacatggcattatcttaaaaaaccatcatttaactaatatgactataatttttgtctttcatgatttgaaaagaaagtggttgactgtttcttaaaattattttatagtgcttaaaaagtaaccttgttttctttagagaataaagaaaaaacatgtttgaatctcttctgtgaatacacggaaaactaatcaccttccctttctaatctgaaatccttagagcctcattcattcagatataagaacaggaggaaagagtccattgacgtgaaatcgrtatcatctcgaggcagtgatggtaagatgtttttcagattcctctgacctttttaaaatgtagaaaatgatggaagaatatgttaaaaaattcatcagcgtataaactccaaagagtaagagttcaacaacaccgacttatttttcaataagctcaaaggttttaggggttttaattattttaattatttttaaaaatcttatgctgtagtctttgtcgtctctttggagggactccatgcttgttccttgatgkcttgaagcatgttgagccataaccacccaagcaactcagagttttagtagctgaacaaggtcactcttgggtgctagaggcagagaggcagccagtcctggcttcccaactcccawcacaaacctagttttcagtgtaccagctatatgcactcacttcttaataaaatgtcacagagaaatcgtgaggcagaatttagcaaaatgtttctgccctgcaaggcaggatttagcaaaacattttttgagttccatcagccaggcctaagtaaacaactggatttgcagggagatggaaaagtcaaagacgattctgacatttcattcctcggtgtctgggaaattttaagtcatatatacagaaatggaaacgtctccaggttttgctaggttgggggttaaggagaagatgatgaatcttattttaatggagatggctaggaagctaacctgcaaccctggtactcggggctatagatgtggagttggcagtcctagtggtgacaggtgaagccaggagcagaagaacatctctaaggggtgtgtgatgtgcatgtagtgaaaggacagagggtccaagcctgagcctgaaggcrtagtctcagccagggggtgggcagtggaaatagggccagtaaagaggacagaagagctgggggtgaccatgagagtgcagtgtcacatgaaccaagaacaagaggggattgagaaaggcggtggccagcagtgttagatgctgtggatatcagaactcgagagcggacaacagactagtagatttcactcgctcatttgatttttatttggcaaatgggaggacacgttctggggtgtgaggaggggatggttagtgcctgtgatagaaaagagagatgaggctggtracttaagagagtcaacagaaaggacaagggagggactttccagtccttctgtacacagtaggaagactgagtatgaaagtggctgacataggccaggtgcgatggctcatgcctrtgatcccagcagtttgggaggctgaggcaggcggatcacctgaggtcaggagttcgaggccagcctgatcaacatggtgaaaccccctctctactaaaaatacaaaattagctgggtgtgatgacgcatgccttaatcccagctactcaggaggctgaggcatgggattcgcttgaacccaggaggcggaggttgtggtgagctagatcgtgcctccagcctgggcaacaagagcraaactccatctcaaaataaaaataaaaataaaaaaaatttaaaaagtggctgacatagcaagaaccaaagatgctagagacaagatgataattcacagggcatgtgagggacrgtaaccaataatataaagagaatatgaatcgagagatttttgagatggattgagcggatagatagaatattttagtctgagaggataagggatgagggaatttgaactggattcactgtttttggagcagaacttgaaggggactgtcttctttccagtacgggcacagtggaggctgaagagcatgcaggtctgcaatggctgctgcactagcagcggggggaccccagaggtggctgagcaggaggcaggctctgatgtggggtgggttcagtgatcccatccatgaaatgggactccccctcctgcctgcctcagagggggtggtaggaagatctgatgagaacagtgcttttcaagtcaagcttctacccttggcatcttaaaccaagtataaacattaactatgtagaaaaataaaagattttttaaaaaatgaaagcttctgtagatttgaactagaacttccatgggtttctgggagttaagagcctaaaggcatgggcaggcggagtgactggccctaattcagactgagaatgggctcaatcctccgccctgaccctaaccatgaactgcctcccctctcaagctggctgcacagtcatctggttacacggccagcagcttaggactgaaagtcatggaactgcaaaagttgggtttgggtgacttgggggaaagtgagccgtgtgggggtcattaagctgttggaatgaggcctttttggacctcatcaaccttctctgaaattccccttgtggacttggggctcagcaagccctcctgcctccaaagttccaggccagatcrcctttccagactcaggcaagtagcagttgggctaccagccttggcagaagagatgggtgaattcatggctttttaggtgggagggtggccctgtgagaagcgggccctggtccatgaagggactcctttgctgcacttagccacactgagccaccggaactggacacagctttcttgccttctctccagcaccaagcctgcagaatcgtcgctatccgtccatggcgaggatccactccatgaccatcgaggctcccatcacaaaggtgagtggcggctgctgcctgcactctgcagtcaggggccctcacacagggcygtgctctgaaaatacatcacactgacatcatggagctcngtctagtggaagaagcaaataacaggcaaataaacacatagcaaataaacacctcatcctaagtcacaatcagggcagtgaaggaaaacaagcgggttctgtgagagaaaattagagtagggcccttaagtaggttggaagagagggtggtcagggaaactctcagtcatgtttgaagcaagtcttgaagcataagatgttactcaggagaagaaggaagagaagactccgggtagcaggaacagccagggaaaaagcattgcnatgggcgaagagggactggaacatttaaggagctgaaagaaagtcggagtggccggagcttggtaagcaggtgagagaggaggaggatgtaggttgtacagggctcagctcattctggacagcagggacatagttaggagtttgtatcttagtttatgtgcactggaaaccactgaagagtttcaggtgtggggtgggtgatgtgaccagatatgtttgttgaaaagaacacccagcttctgtgcagagaatcgattggaggtggcaagagaacaggtcagttagggggctattctagaagtagctgagctagaattatagctgtggaggtggagagaaatgaatagatcaagaaatattttgaggcagaccaataggacttggtgatgaattatattgccagggtagggagaggaatgaggaaaagtattatgtcaggcatggccctcccaggtttttggtgtgagcatgaagtgctttcttgatagaaaatgacatgagatagaagtgctttcttttgcagtgtagaaaccacagaaggtgaacagcttttgtctttgatttttttgttgtgtgtgtttatgtgatttctatggagagaggggaacaagaytgcagtttagtgttagacctgtgagatattccagtaggtatgtcaggtagggaattgaatgtacaagcctggaggtcaaaggaagttgagggctgggaggtatatcgaaagtccctagctataggtgtccaaagtcgtggagacaaaatatcatttctggaagcgagagagtgagagaggggcccagaacagatctctgagcaacyccaatctgtagaggagggccaggggaggtgaatctgcaagggagcctgaggaagcctactcactgagacaggagaacattcaccaggagcccgcagggakaaaagcatgcttcaggaagaagggcggtgccgtgaaagcactggtcattttgaataagagatggttacccactgatttcttttggattctgggcatatatatgacttttgggaagtagaaccctattatcctcagatgtattctttcttcactccrttaggttataaatataatcaatgcagcccaagaaaacagcccagtcacagtagcggaagccttggacagagttctagagattttacggaccacagaactgtactcccctcagctgggtaccaaagatgaagatccycacaccagtgatcttgttggaggcctgatgactgtgagtgatgaggcaaaacctgaaaagcaagagaggtatccggggcctctagagtgcagctgatgtggaaacygttacctgtggttgcagaagtacctgttatatagactaacgttagcataaccagaagcaactgcgtcagaatttatgtataacatgtgcagtggtatttgagtgactcttgcatttgtctttccatgaggctggcctaccatagccatggggacagtgtttcagaattcctatgactgcagggagtcattgggcaactgatggagggctcaatgtgcaagatggggctttgcaggctcttgattattcctgctttcccttgatctggtatagtattggatttcatttccatggacctcagattcctcatgtaatgaaagggtttattgttagactatagcatttaatcttaactatagaatcctttatttaaagtttgtatagaagttccatttataaggtaaaagcagactggggctgttctggctcagggaggggaaggggagaaggaacctctcactgccacattccaaaaagaaccatttacaccaccaagagtagctggtttctagggactcaacctattctggtgttttgctgtgatctatttggctttcataattatctatcagcaagtaaagaaaaggaaaaaaattcaaattgtttatttgagttccccatcagagtctgaagctggaattctttagaaaaaaagtccagaagtcatgtatgagtttgactttgaaggtttctgtccagccctgcagccaaatgctgaatgttgactgcctttcccctccattctccacctggaacttgagggccttcttgtttctttcttgcccctgggctggcctgttaactccatctaatgcagtgcagacctcagcttctaggcagcactgccaagggctctgcaagaaggtggccaccgcagagctgcagtgggaggggtctggttctgggagcaagccatgttccctccctcccctgctgctgatgcaggacaggcaagtccccaaactggggctcagcccgggagggttcttggcctcgcccaggaaataatkcaagggcaagctggtggtgttaaacagcaacttctattgaagcagcagttgtactgcagtggcagagggactgctgcttgcagagcggggctaccccatgggcagtgtgcccctggtagcagctcagaggcagcactgcactcatctttatacctacttttcattacatgcaaatgaaggggcagtttttgcagatatttctagaatgagggtggtaacttctgggttgttaccatggaaagggtggaaaggtctggatgttgtcatggcaacggtaaactgccgtggcatgctggtgggcatagcttatggggaggtgcttctgccctgttctacctagtcctcaatttggccccatgtccgagtcccttctcctacctcactgccataccatcgtgggtttcctctccagagaatgctgtgaggaaccagtgagtgattccacctcaattttatgtggttttggggaagcggagcgagagaagagcaagtaaaaccaagaatctcttgccatacacacgttacaggcaggacaattgtggctgttgttgttacttctgtatttactcartttttaaaattaagctcttggcctaaagatccaacatgtaacttcaggggagtccttcattaattaatactactttaaaccttagcacacatcgtctgggaatgacaaataagcatttctttttttttwaatttaattttattattattatactttaagttttagggtacatgtgcacaacgtgcaggtttgttacatatgtatacatgtgccatgttggtgtgcatttctaaatgacttttaagcaaagatctagatgattgaggtactcagagatcaaaggtggagggaaggaaactgagattcaggaacacttggggactagttcaagagccaggatatggccaagcattggaatttcgtccactctcttaacgctgcatctccaaggacctcaagcccagaaactcttctttaaaaggcaagcagcaatgctcatgtttcaaaacataaaatacagttggggaaaaattagttgggatattagtcaaaaaatagctcaatctttttaaaactttatattagaaggtaatcccctaaatatggctgatggcttcaactcttcaaaatgtaagtcaaaaacacaattaacacagtccctctgagggtgagggggatcccgtcaagatctgaagcaaggtcactcctgtgatttcacctgtgtagcttgaaaatgccaggagaggaagatggcctcagaacagagccaacccacagctcactgtgagtcctgacacagtcacatccactctatcccagttctccacgttctggggctaatagttacagaagggagagtatcrtctgtcttataactgttgtgatttaattttgagctttgcttcaacttagacttccagattggttgggttattcaggattcaaatctctttcactaataataawaaaaaaaagagaatgataatagatataaagcatgcttctaacaggctcttcctttattccaggacggcttgagaagactgtcaggaaacgagtatgtgtttactaagagtaagttttcatctatttacttgttagtgtaacctgtctccagcctgtgctgtccccgctgttgcgattattgttctgggaggtgttacttccagctagtcccatttgagtttaagcatcaatatggtctacatttaaaactagtctcctaattaaaattacttctctgagcacagttagagtaagaattgcaaatctctatacatttaaacagagttaaagtgaattatttttctatttgagggtcttgaagttcaataacagaaaaatcaggtacaagactttttttctagtagtaactatgaagatgatgacagacacccgggcactcaagattccacaattaaccagcctcccccatcccatctgtttgctcagatgtgcaccagagtcacagtcaccttgcaatgccaataaccatcaatgatgttcccccttgtatctctcaattacttgataatgaggagagttgggacttcaacatctttgaattggaagccattacgcataaaaggtatgtgacttctctggctgaaggcagagcaggattgatggccatgctcaaactctcacatttggaaactttgagggagacatgtttttgctgtgagagacctcacgggttctggctctcatgccatgttagagtagtgttgaatgagcagagakactatggcccctgagtgagatcctttgtggagagtattagtaagatgtgggatctgcctgggtatccacagctccctcctttgtgctagtgagccaagagttctaagaatcctcaaacttgtcgaagctctaccctacagaatggaattgagagcactatagatttttttttttttttctgatccatcctgtaggcagaggaaagattagataactgaaaggtctttttctatactaggagaaggctgtttcttcccagaggtgttggtctgttggatatgaaagattctcacctgtaacgtaaataagtaacaggactctaaatgataggactttgggaccatccaagctgtttttttttgtccttaggcttagtcacttccttagggaacataaataaagtgcaaggttaatgtggaagtggggatggagagggactgccaggctcatttctaggttgtcagagccactgaggggcctatgatttagagttcatctagaaataatttggatgtactaccatgaagcatctagttccaaagaggtgactggtgagaaggagagatcctacctcctaatttttagaggagatgcttttaaacccctgtgtgtgtgaagctatcatcagaagaaaaatgcttccatgccccactatcatcaaagaaaacagtttctgggccagtgaatacaatgagccagggtgggttttcctatttttcaggccattggtttatctgggcttaaaggtcttctctcggtttggagtatgtgartttttaaactgttctgaaaccactcttcgggcctggttccaagtgatcgaagccaactaccactcttccaatgcctaccacaactccacccatgctgccgacgtcctgcacgccaccgctttctttcttggaaaggaaagagtaaaggtaggattttgatatcatgacctrgttacctgcctggattggagatccaagaacttaatcttagtaaatacattaggcaaacagctattttgcaaccaagttgacagcttttttwaaaaaaaattttgttaccrrattgactagtcactttggtgttgtaaagacatggacctttctgccagccctcccctcctccaaatacttaaaataattatatcaccatagagactcctttatatgcatggcagatcatgaacccattttccaaatgttagctaggagctgtgttackgggttgcaggacagaacttaattattacagcaaatggttactagatctataggttaaattttagtatcaggatttggccattggtagattacagtccagatattaataatagccattccgcattctacactgttttacatatatttatgtttgtgttttgtgtaggtatgaacgtgcctatctttatattaatgacttttgcataattctgaaagagttccatatcccttagtcttacagttcaatactgtcatgtaccactgctgatttgtagggcagccctaggaaccccttgccctttacataagggcagccctatttaaagctggcaagagatccccatctctcctcctccccagctaccatcacttgcacaccaaagcttatacattcttttgctacaactagaactaaaacttaaattttaaatacccctgggagaagtgccatatggggattgaaattcacatctatctgtaaatgcctgacattagatcattttcttagaaccaggtattgagggattaaggtcctaggtacttaagagctatagtgagacaggtagaagcagaaatggcaggaaaacagtaasggggtatgtggrtaaggttttcttctcagttttgccaacagcatcctgatatttattcactttcatcagcaaggaaacaatgtggcccaagaatgatgcttttgaataattttgtcttctacttttagaaaactaatagtgatatcaacctatgtttctataacacctttctttgaggagcaaaaacaccctggattcctactacaggttcatgctcctcttttttaaaatttttttatttttttgagatggagtcttgcactgttgcccaggctggagtgcagtggcacgatctcagctcactgcaaactccacctcccaggttccaacagttctcctgcctcagcctcctgagtagctgggactacaggcgtaggccaccatgcccagccgattttttttttttttttgtatttttagtagagacagggtttcaccatgttggccaggatggtctcaatctcctgacctcgtgatccacccgcctcaacctcccaaagtgctgagattacaggtgtgagccactgcgccyggcctatgctcctttcttttataccacatgatgtttcacagctgaagccacatgctaccagttgagaacagcacccaattcattaatgccaagaccaaggtgatcaawagcctctgcagtcttgagttagaggtgaacctcactcaagcggaaccactctaggaaaacattgattaaatttttgataaattagggaatgcttagtaacttgatcatatcttactatcctcctccaaaatatatttctttaaattgtgagttctgctagtgtatttggagtctgattagatttctcaaatgacagcaatagaaacaagtttaagattggacagaatatgtttacaattcaaaaaacattttctcatgctggcagcccctgccagagaaccagaaaacttagagctgcgaggaagcttggagaactgagctggaaggggtttctgggctcagaggtttggttacctgcctgtgatcactggtgggtccatcatgaggtgcttccagaaagatttactcctgaggcctcttctaccagatctgctggcactgacaaagagggtcaggaagtattttcttacttctcttgtgtcatctgtcacccctaatttctttgtgataagctaaaattttttttttttttttttttttttgagatgaagtctcactctgtcacccaggttggagtgcaatggcatgatcttggctcactgcaacctctgcctcccaggttcaagcgattctcctgcctcagcctcccgagtagctgggattgcaggcacatgccaccaagcccaggctaatttttgtatgtttagtagagatggggtttcaccatgttggtcaggctsrtctygaactcctgacctcagataatccacccacctcgrcctcccaaactgctgggattacaggtgtgagccactgcttccagccaggctaaaattcttaatgtcactatgacaaagcatgcccaacccagctgtagagctagcatgcccagagctaacagccccttcagttggtgacagaccccatcctctccccatgttacccaattccagggaactagtgcaagtggagaagccaggataacaagcattcctttattagtatctgrgcatacatgaatatttatcctgaataagaaactatttgaaagacagatctagaatgaaaccctttcctcagtgtgatccagatctactcctactggttaaagagggaaaaaactatgcagaggtaactgcacctccacgggactggaatttcgccagttgcgggtttggtggggttttcttccatggacatttcctcctcgacgtagggccttgctactctcctctgctagtgagctagcctgtcttccttccctacctcccagccatttctggtctgacaaggccttgttggtgcccacctaaactgcaggacccattattggtatctttgtaagtcactgagggcatggtttaaatcagtgttagctggaaggaaaggcatgtttcatctagtgctatttatgttttctaccccagttacttgaatctatttcattgaagaattaaaaaataaacaggcctgagactccaagcaggattgaacataccacagyggcactagctggaggcccagagtttgggccccgtgggttctcactgctcaggtacagtcagtgaaggtggagcccaggttggggctgtcctgggtcctgagcttggagatcgctgaacgtgcctgcaggtgaccgtggcctctcctgaccagcagtgaaatgggccaaatgatgcttgcttgccctgggcactgcagaatcaatctctgagaacagctgagaagagtaacttctgctgtccctattcaggaagcctagttgtgttgattggggtcaccccagggttgctcaccagctccatggggtcagcgttgggaatggaaatgactcccttctggtggagacagagctttcagggaagcctgctaaaccagcacaagcaagtgcagccccttggccatcagggtgccgtygcaggacagggctgagctacaggttcaccttcctcacctgagtagcagctcttcctcctgcaggcctaggagagcaaattctgggaataccaaaaatgatgacctccccacccccaacatcttggggaccactttccctctcactatcccttcagccacagtgatgtcgcttacgtttcctgaacagaccttttttgtttgacttcaggaacgtcatgcaggctgttctttctgcctggaattgccctcttgctgcttgttgcctggacaattcctgcttctccttcaggctcagcagaaaaatcacttccttggaagtgaccaccctcgaaatccatgttatccgatatggtagccatcagcctcgcatggctactaaataaaatttaaaatgcagttcgtcagttgcactggctacctttcaagtgtccagtagctgcatgcaactaggagttactttatcagatagcacaaatagaacgcattcctgtcatggcaaaaaatacattggacagtgctgccctaaactagaccaggtcccatggttatactcccaaagcatctgtactttccttcttagcacgtctcacagcaagttacttccgtttgtgtttttaaatgtatttgtctctctccctctacattacaaactccattgtgcagactgtgccagtgtaaatcatcatggcagctctggcactatgcagtgataattggtacytggtaggcactcaataaataataaattcctagcacaacatctcttatataacagtagcccatctgataactcctaaagctgcaggctcagaaaacacttgtatccccggatgctctggtttgtttctttaattacataatgagagctttcgaattagggtttccctttttgcctttgctgcctgctagcccagagctgaattttgttcttatttgcaagaacccctttagccttaattttcctggcaaagttattctttcccttggtcttcttttactgcttggtcctcttttacctggtactcttttactcttctacagctctagtcatttcaccattgtatgaayagttttgttgtatctgagccatttgctaccagcacactcaaaatcttttcagagctaggcaaattggtaatagttgtgatcacaggccactttctgctgtggcagaaataccatacagtgggcaattcaaaaggcttgtttggcctcttcctgcagctgatggcccctggagaatgaattaagcgtctgctgtaactgtggctcaggttgccctccagataacagacagcacagtaaagcgatgctgcatgtccgaggccgcctctccacatctaggtcagaaggctcagctggctaaaaacgttctgaaaatctcaaatcccctgacccgaccctccgcacagacaaggatggatgtgggtctccaagatccagtgggtaatgctcaaccttgcctccccatatcccagggaagcctcgatcagttggatgaggtggcagccctcattgctgccacagtccatgacgtggatcacccgggaaggaccaactctttcctctgcaatgcaggcagtgagcttgctgtgctctacaatgacactgctgttctggagagtcaccacaccgccctggccttccagctcacggtcaaggacaccaaatgcaacattttcaagaatattgacaggtttgttgtgctggggctcctgtgctcaagtttgtgaagtttaagtggttttcccaaatacttagcttcctcttaggggaaagggaaaatattagctgtcccactgtaycagatgataaaataaccttgcccttaacttaatttgacttttcagactgcctttatgttttgaaatctcatttggtcttcagtgagttcataaaaatgttttatacactgcagaacactacataaatattgattgtactattactaagtacaccagatatttttaccctcctacgaggacatcctgtcttttgtgtaactcgaggaaaatgtatccacccccatttttccctagctcaatttccggccgcttaaaatactccctcatgagtaggtcccacagagcgggagcacgaagggtggggcaggttaccccagccccgcattctctgatgagagtgggttagatgtgagcaggtcctcttgcctcccagcaccttgcagtcaggcttgtgggtatttcccacacagcaccagccaggctggtgcacagatgcctgggaagggggcagtgtacagagaacatggagctcactcgggcctcaggaatgctggtctatgtgaacctattggtttggtctccagaaaactgggaaaacatggagatgagttattccagctttggcttcagcttcatcagtatcgaggatgggtttttaaacttttgcagaaaaaattctttccagtagccaattttattcaagagccattctggctcttgaagttagaaaacgacgacagaattggatggttaatttggggcagggttgttgcttcattcattacaatttctatctgctgcagtctagagmattacttattaacaggaaagtcttccaatgcyatcattgaaagaggctgtggccatcctgtgcaatgggaatccctgtgtttgcacagagtgcagtgggccagcttatgtggctgccgtgccagcctgccatttcctgccaccttactgttttgatgttctcaagggaagggagaggggaatcaccttgtcagataaacgtccaccatgtgacaggtaccttctctcttttttaaaatactcataratcacataagggtcagctatcactggggaaaatggaatagcatctgcaagtcttgcttactgggaggacgagctcttcttgtgatctgcacacatttcttaactctgtgccccagcttcctcctaggttgtgaggagtgtagtgaaatggtggcagaatagttataatttgagacacgctgtgaacaagcccctttgtcttgtggttattttaggaaccattatcgaacgctgcgccaggctattattgacatggttttggcaacagagatgacaaaacactttgaacatgtgaataagtttgtgaacagcatcaacaagccaatggcagctgaggtgagtactgctttccatgccataaggcacatccaagtacatttccrtaagagcctgctctggccctgaagcattttctctcccactcaaatrtaaggtggttatttacttggagttgataaagggctgaaaggactggccacttgttttccttggggatgaaaataaactgtgtccacagcaactctgagctccttgaaagaaaggccctgagaaaaagccagtactgaccagaaaagcttggcccaaagaatatggaaggagacgcagacgaacagagactggcataaatggtggtattttagagaatccaaagcctttacttctctgttcactgagctcttggaaaacctcaaagttggaaggtgttttaaaaaacaaagaatgttcctgattcacattaaaagcataccagtacctgaagactatcataaaactgggagtgactggaaagcagaagcatttattgtgttttccttttttaaaacctactcatgtaccttggacctgccttaaggtccttaccaatttggcttttaggaacatgaaacagaaggttcacacctaataagatccactgttctctgaagccatgaagctgttcataaccccataaaggtagaaaagctttccgctcattcctgttgagcggcagaggttggcaaactggatggatgtgaatgatcatcatgagtaacttgctcagtaaggagatgatctgtgtaggacccatcccatgaccagtctggatggagtgacagtgtctacctcacctatttaagccccttcccccagggattccacagcacaacaccagagccctctccttccacagaagacttacaggagcaaggatctggggatttagagaaggaaaagtatagagattcatagaactaggaaggtcatccactcatgtaagcccccacctctgcactgcaacttactattaactgcagtatttatagtaaasagtattactttgataagtartcaaaaacctccagaacatattctgcccattgatagtctaataaataggtccagtcttaaaccccccaaatgtcatgcagccttttggcttggcagagctctggagacctaattgtttttacacaatcaatttgatggtgtctttaaaagtggagaataacaatctttcaggttctatgtaaatggcctgtgatgtgtgtaccaactygtgtcctggccacatggctcaggacactgacatcaccactaggtgtggaccagtctttctaaacatggctgaacacacctgctcctgactacttcctactccaaggaccccacgcctacctggctcacttaccagccagtcagaagaacagccaagaaaacatgagtggacacatgccttaggagaaccaaagtgcgagagagttgggtgagttgggggtgggacaggtcataggagggagggagatggtaggcataagtagtagaaatcaagaaataattgaagggttacatgtatgtgccactgccctacctgaaatgcattaaagtagctaaaagctctgcttttacacattttttwaaaaaaactgggagaaatttcctctaagattacatatcaaattgctcaaaataaaaacaaaactgctgtagcagttacctctagggaagaaaatggatgtgaggggtagacaggtggtgacagggactttcaactttcaaactctgtgtgtgtgtgtattgctgagtgtcttttaagactgtatcagtatattctttttttaaagaatgtgtcagtatattatatatggaatttaaaaaaggaaaagctgccttcgccgagtcccagtcctacctgtgtgctcggtgatcaccatcgaatgcctggcgarttaacccttgtgggcttcaccgtcatcttgaaccaagcctgatctgaccatctgttttccagattgaaggcagcgactgtgaatgcaaccctgctgggaagaacttccctgaaaaccaaatcctgatcaaacgcatgatgattaagtgtgctgacgtggccaacccatgccgccccttggacctgtgcattgaatgggctgggaggatctctgaggagtattttgcacaggtgcgccatctttccagggaagctccacttcccctctgggaatgggaactaggtcatggaackcctgggggattctccagctgagtaactttttaccaattagttaaccactcctccctggaagaaagcagcttacccccacctggggtaggcttctggttccttcaggagctgactgatggggctgatcactaaccagagtctcttgagaagggggataaactgagcctttggaagtaacttttcatcttcagttkgctggatccagaacttgcacaaaaaccgagaaatcttccattcattcactaggttattcctgggtgtctacatggcgcgttatgggaacacaggcattagtgaagacatcgcggccrcggggagttccagtccaataggggagagatgtagataggtccacatgttagtaaaaaatgaagtgtatctcaaggaagtttatgttaagtgctacagacgttcagagagacttttttctagataaaaggggggctacagaaatggaataggaaaagactttctggaagaacaaagcattctgagcaaaattaacaaagggaggggaaatagaatttttrtaaaaagggaagagcaatatgtagttcactttaattgtagcagtgtagagagttaaaggagagaaatctagaaagcagtagactgtaaatggacatgtgaaaacagccctacttccagagaagagactctaagcactgatgggtgtgtgggtgacaaacaagcagccacaagtagtgaattttgtggggtctgcatggctgaaatgtactgtggaggcaggataaataagggcaggataaagaatagatgatgcctaggaagactgggaaggggagtgaccagcagaggagcccagtatgtttaagatttgggggtacatgtgcaggtttgttaaaagggtatattgctgatgctgaggtttgagcttctaatgatccatggctcaagtagtaaacatagtacccaataagtagtttttcaacccttgcccccttccctccttttgaagtctccagtgtctactgttccagtttctgccactgtgtgtacccaatgtttagctaccacttctaagaaagaacatgtagtatctggttttgtttctattattacttcactttaggataatggcctccagctctagccatgttgctgcaaatgacatgatttcattcttttttatggctgcatagtattccatggtrtatatgcaccacattttcttcatccagtccaccaatgatgggcacctgggttgattccatgtctttgctaccatgaattgtgctgtcataaacatgcaagtacaggtgtctcttcagtagaatgatttattttcctttgggyatatacccagtaatgggacggctgggttgaatagcaatttctatttttagttctttgagaaatctccgaactgctttccacaggggctagctgatctaatttatttctcaccaacagtgtataagcattcttttctccacaaccttgccaacatctgttattttctgactttttaatagccattctgactagtttgagatggtatctcattgtggttttgatttgcatgtctgattagtgatgctggacttttgttttgkttagttttttkttttttttttttttttttttgagacagtcttgctctgttgcccaggctggagtgcagtggcatgacctcagctcactgcaaccctcacctcccaggcttgagcaattctgcctcagcctcccaagtagctgggactacaggtgcacactgccatgcccggctaattttttgtattttagtagagatggggtttccctgtgttgcccaggctggtctcgaattcctgagctcaggcaatccgcctgccttggcctcccaaagtgctaggattacaggcgtgagccaccgcacccagcctggacatttttttttttatgtttattggctgcttgtgtgtcgtcttttgagaagtgtctgttcatgaaatccagtaagtagactgcagctttctgggaagagagcctctgaattgaagaaaagtaggacaggtagttctgagctttccagagagaagaacaggaagggagtgaggatcaaatgactccttgaacaccagtggatattttaaggctgcttgatcgactgacctgaaatgagcaagccaagccaaaagctgctcatcaatgggcttccccggacccacagagagaggacctgacgtactactcctagttgttctcagtgtgaatggaggatgagaaaaatgtgcttttaagttttttgataaaagcttcctatttaggtgtccttttcccaaaaagcaatgtactaatgttcataagccagggtgacctaaaaatgaaagttacaaatgaagcctttgagctggccttctggctyaatacaccaccaggaaatgcggatcctaatactcagctcaatgaatgatgatggccttagtttaatgtgcagaatactcagatttccacacacctcaaaagctgcaaggctaatacccaagtttgaacaatcatagtttgacagtcattctttccagtgaaaataatggtccatggataaaaacagctggttcagctcaattcaagtgcataagtgctttccacaagacaaccagcagattttggtatgcagttcaagtgtacgtgtactcccatttcatcacattcatcatmcagaatattacagagacatgtacttcgaaggtcaagatttaatacaattaataactcttactgcttcaaagaggtaattctcaagtgaaactggttctgtttttttgttttttgttttttktttttaatgtgagacaagatctcactctgtaacccaaactggagtgcagtggcagtcctggctcaatgcagactcaaaactccaggccccaagcgaacctcctgccttgacctcccatatcactgggattacaggcrtgagccattgggcttggcctgaaactttttttaagtgcaaacatgtggcagcaaataatataatgactatggctattaatacagtttggtgctagttcattgagtcatgctaaggtgttagcagttttacccactattgcttcttctcagtgtaaatgtcagtagttttggtatgagaattygtgyttgtatgacattgaacagagctttgactttgcaatgataaaagcagatcccagaaaaggggctaagtaccctgagatcaatgtgtcaggagatgctatggtatcacayagaaagaggcttggggccaggcacagtggctcgtgcctataatcccagcactttgggaggccaagggaggcagatcatctgaggtcaggagttcaagactggcttggccaatatggtgaaaccccttctctactaaaaattagctggacgtggtgacaggtgcctgtattcccagctactcaggaggctgaggcagaagaattgcttgaacctgggaggcggaggttgcagtgaaccgagactgcaccactgtactacagcttgggcaacagagtgagacactgtctcaaaaacaaaaaaagaggcttgagagtgggaaggtctgagtgtagtcagtgtagctcagctgacttacgtaagtctgaggaccttgctgagcctatttcttcattgagaaaactggataatgacccattttcacagggttgttctgagaaacaggatattactgtgaaagtgtctcgcatgtcctccagccctatgtggtggttttttcttacagactgatgaagagaagagacagggactacctgtggtgatgccagtgtttgaccggaatacctgtagcatccccaagtctcagatctctttcattgactacttcataacagacatgtttgatgcttgggatggtaagacagttactgttttgtcacccaaagaanattgttatactttacgaatattatctttagtgacacagggtgagcctaaaggtaaacaaaatatatttttaaaaatgtggctgtcagctttttgtggccaagtggggtggggtgcattctttgcatccccagcagctggcacagaagcttgtgtgcagaagacttgatggatttttgatagctrgataaacgagtctctgcctcttcaaaggacacgctgccaaagcttactgcagtgtttttctgtcgttggaggaaaactctagaaagaatgcaaaatgtatttagtttactctgaatcacaggttcttctgataatgtcactgataagcagcttttcaaaaaggacctgtttgcatttcagaaactagtgtttaatgacttgtcctcatgcttcgcccagggtgtgcctcctctaattctgatcccaaacttgtcccagacacccccaggcttataaatgctcctggggtctaagttcaccrgtttcttttgattcttttctgtctttgcagcctttgcacatctgccagccctgatgcaacatttggctgacaactacaaacactggaagacactagatgacctraagtgcaaaagtttgaggcttccatctgacagctaaagccaagccacagagggggcctcttgaccgacaaaggacactgtgaatcacagtagcgtaaayragaggccttcctttctaatgacaatgacaggtattggtgaaggagctaatgtttaatatttgaccttgaatcattcaagtccccaaatttcattcttagaaagttatgttccatgaagaaaaatatatgttcttttgaatacttaatgacagaacaaatacttggcaaactcctttgctctgctgtcatcctgtgtacccttgtcaatccatggagctggttcactgtaactagcaggccacaggaagcaaagccttggtgcctgtgagctcatctcccaggatggtgactaagtagcttagctagtgatcagctcatcctttaccataaaagtcatcattgctgtttagcttgactgttttcctcaagaacrtcgatctgaaggattcataaggagcttatctgaacagatttatctaagaaaaaaaaaaaamgacataaaataagygaarcaactaggaccaaattacagataaactagttagcttcacagcctctatggctacatggttcttctggccgatggtatgacacctaagttagaacacagccttggctggtgggtgccctctctagactggtatcagcagcctgtgtaacccctttcctgtaaaaggggttcatcttaacaaagtcatccatgatgagggaaaaagtggcatttcatttttggggaatccatgagcttcctttatttctggctcacagaggcagccacgaggcactacaccaagtattatataaaagccattaaatttgaatgcccttggacaagcttttcttaaaaaaaaaaaaaaagtttatatacatgtttaaaatttttattaaaatccaaattttctgggtgtaagcccatgcagtatgttgtgccatgcaccatctatacgtaatattttgggaggggataggggaagtttcaaggttcagatatttttaaccagtctatatttgaaatcatgccattagctttaacaatgttaaaattgtgtggtgtaaatatatcagaaaataggcatatggggaggcagtaaatactattttaagctattaattgtatgctaaaagcttctaaagcacaagtgcatatttttatactgctcttttcacaactccctgtgatctacataaagtcagactcgagattttcctttctcttttaccagctgatccttcctatgtattataaatattagactccgtaaacaaacttcatttttctttctctgtacttcatgctgcatttttaaaaggtataaacaaacagagactgaattaattgaatcagtaattacttttttccaatacaaattggaatgcagaatacttggaacttgtacatggggaaaaaatgacttatcactacataatgtgccaatgtttttttctatgttttgtaccaaaaatggaaaaatatgacaattccatgcaaagaaatgtatctaaattatttttgttagatgataagagaacttgcttggtcaggacagcagccagctttgtattgtaatgctatattatgtaaawgtgatgaaaatgtttttgtgaagtacttgtaactaaattcctacagccatttttcactcccaacagctgtttttattttacctctttggcctaaagttttcataatttcaaatttggggtttagtgtcctttatttcatgagtcacacactttgttttcagagcacattaaaatcaggatgccagaatcccatattaaggacctagctaacttgcctaggcttcagaagcttgcttgaggcaaggacaatctttttctgatcatctcactttcagttctatttggtaagtaacatttatcaggtgtcagacatcttctatatgaaatatttacagcttactcagttttatgtcaaatttcttgttaacttcaaactttttattagtaatgtgcaaatgtttaaaaatgctttaagacagctaggtactaaagcgtcaacaatttctgctctttaccagtgtaatctacggtataatcttctggcctgcgaactagtctattcttccacatagtcaacttgttagaaatacaggctttcagatgatatgtgtatcagatagtttatattatataaactattataactgcctcttacacagagttgtttacttaaatgtcatgtgctgaggrgggccgtattaggaaaatgcaacactctctaataatttccgtgactagtaagagaaggaagccagttataaaacactgctggaccagaatgaccctataatttcctaagatcattctttatttctaatttaagatttttaaatttacttgccctccatgtcaggactggttagcattctgggcaaaaaaaaaacaagcctgtcagttcactcagaacctactcagctttagagagagaaacagaagggatgatcttgtgcccttgcgctatgtgaatatagccagagactgaggtaataaatatattttaaaataaaaatgacaagggatttgtacactgtaacactatgtagtgttacttctgctgttgcaagtatcttaactgttgaaagctaaactcaggaaatggagaaaatgtacataatatacattgacccattattttattctaaattgaaagtccaacttttagcagcagtctacctgcaactactgaacaccatcaggtttgagtccctaccagaatctcccatcatactgttatcccccatctctgtgaccttagggcatgcatgaaaacaaaagcaatctagtccctagggttggagactgccctctagacagtttttcatggcagaaaattagaatacaagtatacctcattttattgcattctgcttcattgtgcttcaaagatactgccttttctacaaattgagggcttgtggccaccctgcatagagcaagtctatcggggcattttcccagcatgggctcactttgtgtaagtgtcacattttggtaactctagagtagagtatttcaaatgtttttattcttgtatctgtcatggtggtctgtgatcagtgatctttgttactactgtaattgttttagggtactgcaaaccatgcccgtataagacagtgaacttaattgataaatcttgtgtatattctaactgttccaccaactagcggtttccagtctctccctcttcttagacctccctattccctgagacacaacaatatcgaaattaagccaattaataacctacagtagcctgtaaatgtgcaagtaaaagagtcacatgtctctcactttaaatcaaaagctacagataataaagcttagtgaagaaggcatgttgaaagcccaggcaggtgaaagccatgcctcttacaccagttagccaagttatgcaaaggaagagttcttgaaagtgttaactccagtgaacatgcaaacaagaaagtgaaacagccttactgctgagatggagaaagtctgagtggtctatatagattaaacaagccacaacattcccttaagccaaagcctaattaattcttcaattctttcttcgaagactgagaggtgaggatgctacagaagaaaagctggaagcaagcagaggttggttcatgaaactatccccattaacgtcagagtgcaagggacaacaacagcaggaagttgtccagatgatctagctaagatcactgaaggcgactacactaaacaactgagtttgtgaagatgaaatggtcttctattagaagagatgtcatctaggacttcatagctggggagaagaagttcaatgccagcgagtgtagttggtgcctttaagttgaagtcagagtttatttaccagtccaaaaatcttaaggcccttaagaattatgttaaatctactctgcctatgctctagaagtggaataacaaagcctagatgacagcatatctgtttatagcatggtttattgaatatttaagcctatggttgagacctgctcaaatttctttccaaatattactgcccattacaatgttacctggtcacctaagagttctgatggagatgtacaaggaggttcatgttgtcttcgtgccagctaccacaacatctatgctgcagtccatgggtcaaggagtcactttgacttttaagtcttatttatttaagaaatacatttaataaggctgtagctgccctaactagtgattcctctgaagagtctgggcaaagtcaattgaaaaccttctgggaagcatttagcattctagatgccactaagaacattctgattcatgggaggcggtcaaaattccagcattaaaaggagtctggaagaagtggagcctgaagatgtgaatgaattgctgtaatctcatgatcaaactttaatagatgagaagttgcttaagaatgtgtatagaaagtggtttctggagacagtcatttccacagtgaagatgctgtaaacatagttgaaatgacaacaaaggatttagaatattctataaacttagttcataaaggagcatcaggatttgagatgacagactctaaattttgaaagaagttctactgtgggtaaaatgctattaaatagtattacatgttacagagatctcatttgtgaaaggaagtcaattgatttggaaaacttcatcgctatcttattttaaggaactgccacagccaccccaaccttcagtaaccaccttagtcaacagccagcagtatcaagaccctccaccagcaaaaagattatgactcgctgaaggctcagatgattgttagcattttttagcaataaagtattcttaaggtatgtacattttttagaaatttaagactgtagtataaacacaagttttataggcactgggaaaccaaaaactagatgtgactcactctatttgcaatagttgcttttttgatgtggtctgaaacctaacctgtagtatctctgaggtacgcctgtataatgaccagaaggaatttgctgtggtacttacggtaccatttgcttccaaaattcatgtgatttctaccactccatttgaatagattactatcacaaaatactagcctagaacaggctaggaagtaaaacagttaagtctatggctcccttgtgtcatacaacttcagaaaacaactttacaaatgtatgggccaatgcagaatttctaaaggaaaaagcacgtgaataatgggagaaagtcttctgtaattgaggtagcttaagttttaatatttctccatagaacttttcatgactcaatgttgtttggatttaaagtagtcatataagcctttctcattcagtcttcagttcctgtttttagagctgcttggtgatactgggcactacagatttaattgcaaggccttactgcactgggcctcagtttcctcatttgtaacattatgccactggtctactcagatgaccttaactcttccagtctttgtaggtagttgtggaagcaactgtcaaagctaaaactagtaaaagaacttatggagattccctttagggtatatttgtagtatatttgtataatgaacaaataaatctgtaggttttctgtaagaagggtcagtctgctaacatcagtcacgttgccctttcttcatcagtagtttaagaatttcaatctttaatgtgtagactactttctaatatttttattttttagcaccaaaaggagaaaacatattgttacaaggctggttatagtgtctcaatggacactgcaaagaactacataaaagaagtctgtctcaagcagttcgtatttgagtcagtggtcagatggggcagttgcgctcagctgcagtccctgactccggaaacactgtgcctctcaaatgatctagagctcatccttggcgtacatgaggggcagttgttgttctagtacccatttagcccatggctcttcaagccaattcacactgggaaaaacacaccctcacaagatgcctatccatttgagttcatacaggttttagtagctagaactaaaaaacatttttaaaattatctaaacaaattggtaccaaagaaaacttgccatacttaaacagtatatatgttcccttttttggctgagagattcaagtttgtgctatatagaacactaacagttactaaagactaggaaaatttgcaggagaaaggctatttttaaacttcacaataattctaaaggaagccaaataataaaacttctaataaatgccataacttaactattacctctatttgtacctttcacaaggatctaggttcaaaataagctcaaaacacagcactcaccacttcaacagcagctcaaagtcaaatggaaaaacttgtggtatattctttggaggatatactaggacctgagaagcaacatgttcctggttggtaggtccacaaaaaatttaaacatgtagaattttatggactgacaaaaaaaattaccaatttaagtgatcaatatattaatggttttcagagtagtacccgatatttgatgttcaaggttcatgcatgtgtatttttaattccttaaactagacagcaaggtataagtcaccattctcctctaatttttgaaataatcttaaactgcgcaatccagattctcgctctccatttttccacaaaataatgagatgatcagcggagcacgtcactagtccatgatcttcaaagtatagaaacatctgtaaagaaaattaaaactgattatagggaccccgaaaagcagagaagtgtctaataccacattaacacatgtgcgtgtgagatatgtgccttaaagactcctttggatctgggtgtagaacttcatttcatttttcagtattggtaagtcacatacaaataatatctaatattttaatcagaattttgttaatattgttcaactacagaatagctatttttgtaaagtacatgaattctcatagttcttccagattttttcataatctgatttttcaagtattggttttacttaaccattacttatactgtataatggctatggaaaaaatgtctgaattctaaatttcccaagataaacactggcttcagctctctataaaagtagatatactcaatccataggtattaagtgtcagcactaggtttatggtccctaccctcaagaagattctgaaaagcaaatcataattgaaacaataaaggtaccaatgagagattatgtaatcaggtactaaataatgcagtatagactatgacatgtcacagaaattcagaaaaagcttcaaagggagaaaatgccccaagtaaggggaaggggcttgcccagtgaaggaataggctggaagctaagaataggaaaacagagtgttgacaaaaggcagcatgaatactatggggtgaagagttgtatcagaaaagtgaatcaatgaaaaggatgaggtcctcgaaggaaagggtgaaataaaagagaaacagggccgggcgtggtggctcacacctgtaatctcagcacttcgggaggctgaggtgggtggactgcctgaggtcaggagtttaaggccagcctggccaaacatggtgaaaccctgtctatactaaaaattagctgggtatctgtaatcccagctactcgggaggccgaggaaagagaatcgcttgaacccaggaggtagaggttgcagtgagtggagattgcgccattgtactccaacctgggcaacaagagcaaaactccctctcgggaaaaaaaacaagagttttctctgaaatgacatatacatttctgaagaccacaggataagactcagctgaggatgcaggagtgaagggaggaaacatgggagcagaattccttcggaaactggaaaacacaaaattcagtacacaggtagaggggttgcgccagtagagcaaggatgaaaatagaaatgaggaccagcctggccaacatggtgacaccccatctctactaaaagtacaaaaattagctgggcgtggtggcgggcacctgtaatcccagctacttgggagactgaggcaggagaattgcttaaacctgggaggcggagagtacagtgacccaagactgcactccagcctgggcaacagagtgagatgctgtctcaaagaaaaaaaaagaaatgaggaaattcaggtgacactgcaaagatagcctagattttatcaacgaagctggagatgctttttaaaagtgttcaggtctcaacactttcactcaggaaaattcctaagaagctgacactgttttatagaatgagaaatgtgccacattcaaacacattttgaatgtcttttacatggggttttccctaccatctaaaaacctttttaatgagttcctactatttaaaaaataaagtccaaactcctcagccttacattcaaggacatccataatctgaccccaaaccacgttcccaggctttatcccctactagtgtctgttcacaggaacccagcgctccggcctagccaaggtgctccttgccaccacgtaaatgctatctttgcccttctgtctaccacagtccatgctcacctcccaaccataaacacaaagttaaaaactgagctacttgttagaggaaagcaaagataactatgacactgtaccccaacatcaaggagcttatgatgacaaggctatatactcatcctactaaacttcaaggttcagctcaagtgtcaagtcctatatcctctaaccatttacaagattcagcaagaaatgtttcttctgagtcactgctgcttacttgggtccatcaaatgcagcc

SEQ ID NO: 95735 - DNA, 78504 bp, Homo sapiens
  misc_feature (1)...(78504): n = A,T,C or G
ctatgattaatcctgtattttgcttatggaatgagatataaattgaagtacatttatttggatatggatgtcaaattgtctagcacaattaacaaaaagactttttcaatagtcttttctacactgactgcctttacacttctgtaaaaaaatcagttatccatatatatgtggctttattttggtactctattctgtcccattgatctatttatctcttttattgtggtaaaatatactaacatatttgtcattttaaccatttgtaattgtacaattcagtgacattaagtacattcacaatattgtataatcatcaccactatatacaaatgtttttcattggtctcaacataaactctgtactcattcaataataactccctatttccccctctcccatccctggtaacctctgttctattttctgtctctatgaatttacctattctaagtatttcataatagtggaatcatacaatatttattctactgtgtttggtttatttcacttaacatatgttttcaaggcccatctatgttgtagaatatatttaaaaattaattcctttatgactaaataatatttcattatatgcatacatcacattttatttatccattcatctgtggatggacacttgggatgtctccggcttttggctattgtgaatagtgctgatgtcaacattggcccaaatatctgttgagtccttgctttcatttcctgtagatatatgcctagaggtggacttgctgggtcatatggtagttgtatgtttaactttcgagggtctgctaaacgatttttcacagtggctgctccattttacatttctattaacgatgcacaaggactccaatttctccatatccctatcaacatttattttccagcttaaaaaaattataggcatcctagtatgtgtgaaatggcatgccattgtggttttgatttgcatttttctaatgactaattatgttgagcttcttttcaggtgcttaatgaccattcatataccttccttggagaaatgtctactcaagtcctttgcccagttttaatagggttgttttatgttgttgttgttgttgagttgtaggagatgtttatatattacaggtatcacttccttatcagatgtatgatttgcaaatattttcttccattctgtaggttttcattttcttggtagtatcctttgacgcatgaaagttcttaattttgatgaagtcaaattggtttattttttcttttgttgcctgtgcatttggtgtcaccgccactaaattttgccaaatttaatgtgatgaatattttctcctccaattttttttcttctaagagttttacaacttagcttttaagtttaggtatttgactattttaagttaacatttgtgtatggtataagataaggatccaagttcattcttttatgtgtagagatccagttttcctagtaccaattgttgaaaagactgtcctttccccattggatggtcttagtacacttgtcaaaaaaattgaccatatatgtaagagtttatctctaggctctctgttctattccattggtctacatgtctgtccttgtgccagtactattactttaacttcgtagtaagttccacagttgggaagtgtgagtcctccaaccttattttctttttcaagattattttggctatttgggaccccttgcaattccatataaatttgaggattatttttccatttttaggaacaagattattgaaattttgatagagattgcattgaatctggagattgctttgggaagtatttatatcttaacaatgttgtctttctatccaagagcttggacgtctttttatttatttaggtactctttaatttctttcagcaatgttttgttgttttcagtatagaagtctttcacctccagggttagatttattcctatgtatttaattattttagatgctattgtaaatggaattgctttattagttttctttttggattgttcattgctggcaagtaggaacaacactaattttttttgtattaatctagtaccctgcaacttagctgaatttatttattagctctataccttttttgtggattcttcaggattttctatatatagggtcatatcatctgcaaatagagagagctttacctcttcctttccaatttggatgctttttacttctttttgtctactagctctggcaagaacttccaatacagtgttgaagagcagtggtcaaagaggacatctttcttttgtttctcatcttaggggagaagctttcagtctttcaccatcgaatgtgatgttaaccatgggtttttcataattactttttatcctattgaggaatttcccctctatttctggttttctgagagttttgtgataaaagggtgttggattttgtaaaatgcctttctgcatcagttgagattatcttgtggttatcttcctttgttttattaatgtgatgtattacattggttgattttcttatactgaaccactcttccattcccggaataaatcttacttggtcatagtaaataatacttgttaatatgctgttggatttaatgtgataatattatgtcaaagatttttttcatctgtagtcataagggatattggcctataattttctctttttgtgatgtttttttctggttttggtatcagggtaatgctggccttgtataaggagttaaaaagtgtttcctcctcttcactttttggaagaatttgagaaagatttgtgttaattcttctttaaatgtttggtagattcatcagtaaagccatctggtccaggacttcacttttttgggaggtttttgaatactgtttcaatctctttacttgctataggtctgttaatattttccatttctttctgagtcaatttaaataatttgtgtatttcaaggaatttattcatatcttttaggttatctaatttgtgttcgattgttcatagtggtcgcatagtcccttttctctctgcaaagtcagtagtaatgtctccactttcattttcaattttagttatttgcattttctctttttttctttgtcagtccagctaaaggtttttaaatttttttcatctttgcaaaagaccaacttttggtttcattgatttgctctattttttctattctctattttgtttatctctgctctaattcttattatttccttcctcctactagttttgggtttcatttgctcttctacttcaagttcctatggtataaagtcaggttattgattttagatcttcttttttaatgtagacatttatacctataaatttccctttaagtactgcttttaccgcatcccgtaagttttgtcgtgttgtgtttttgtctctaggtattttataatttcttttgtgctgctttttcttgtgactcattggttgtttgagtgttttgcttaatttcaacacatttgtgaattttccagttttacttctgtcactgattcctgttgtggtcagagaagatactttgtgtgatgtctatcttttaaaattgattgagacttattttgtggcctaacatatggtctatctaagagaatgtcttacatgtgcttgagatgaatgtttatgctgatgttgttgggtagcgtgttctttatatgttagatgtaattagtttattgtgttgtttatgtcctctatttctttaccttgtctggttgttctatctattattgaaagtggacagatgaagtctgctaccattgttgtagaactatatctttcttcaattctgttaagttttgcttcataaattttgagggtctattattaggtgtgtaaatatttgtaattgttttatcttcttgctatattgactattttattaatatataacataatgtttctgtctttgaaaacttttttgatttaaagtctattttgtcagctgttagtacagccactccagttctcttttggttactatttgcatggaatatctttttctattctttcccttttgatctatttgtgtctttgatctaaagtcagtctttcatagacagcatatagttggattctagagtttggtttttttttgtcaatctgccttttctttggacagtttaatctatttatatttaaagtaattactgataaagaggaatttctatttttctatttgttttctatatgccttatagtttttttgtacctcattttctctattactgccatcttttgtatttagcttattttttgtagtaaatgttttgattccctgatcatttccatttatgtatattttacaggtatttttgtgtttaccatgagaattacatttaacatcctaacgttataacaatctcattttaatttataccaacgtaacttcaatagcatacaaagactctgctcctatattgctccacccccaccctttctattgatgccacaaattacatctttatacattgtgtgcccaataatatactaatcttgtaaaaaattctttcttagctgtcctaagaggaaccaagggaggaagtgttcaaccctggaccagtgctttaaagcatcagcagaatgtcccttacatcagagtaatgtggcattgggcaaaccctaaagagcatggggcaaaccctaaagaatgtggataatcagaagaataaaatgtaggctatttgggcaaccacattgtctcacgtgaagatattccttccagaactgaactcctgatgtctctgagttttgttttacttaaagataagtccctctttcccaggggatagtctctgttttggtctgtcttcaactgtatgcagactgcaatttggggctagcacacagaaggcaacatgctcctgatccttgggagtgtgttcttgccgagtgcactcaaaaggaatacaaagatgaattataggagatccgagttccagagggactgtaagtttgtgtagctgctcacaaccaacttagcttaaagtgggatgtatggctctctcttattggtgactgggacattatgccttgtccctccagagcagcattttatgtgattcctttctgcttctctagtgcatctgtgtccaatacatgtttgctgaattaatgcattagttgggacatttgtagattccctacaacaatttactgctaggaggattatttgaacctaatacatatgcaaatatatatatttatacttttgcaaacatgatatgtataagtagttcctagaccagtgattttcagaccttgctactcatcagaatcacctgaggagccttcccaaaaccccgattcctacgtcccaaccacaaagattattttaatgagtctgaggtggaagccaggaatctacattttcaaaagctacccaggtaattctgatatgcagtcagcatagataaccacagccctttgactacctaagaaaatgtagtagtcaaaaaaaggtatatgaactgccttctattctttagggagattctatgttaatatagcatacggtcaagaacactaccaatgtagccacttcctagctgttatctttagacaaattacctaatcattcagagctttagtttcttgatgtgtaaaatagaggatataggtttaccatgaggatttatgtaaagccttagcacagtagctgtactatagcacacagtaaatgttggccggatttattcggctgtacacatgagccactggatttgtctggatgcagaagtctactgcggtacaccttcttcakcaagctcttgggaaagcaggggagatttcctggtaccctaggaagtggaggatactaaagccatgtcacagggaggggcattattcttcgtgcgcgcttgctcgccggggtcgggttgctgctccgcgcgcgtccaccaggggccgctcgagctacctaagctccgtgcgctacccggcggcgctcccgcgcgtgctcactcggagcagcgcgcgcccsgcaatcgccgcagccgcccccgccgtcggccgccgcaccccaagcgactgcccaaactaagcctccgtggctgggtacgggagcgctttggggacaaaaattctccctcaactgtggtctgcattccttcggcccgtgggcygatctggggcgggaagtattagcgtctcagttgcgctgcagccggggaggaaggaggaggccgagcctggggcggagtttgggctgactggggctggaccgggcaagacgccgccgctgcccggatgttgcgatggctgatcgggggaggccgagaaccgcagggactggccgaggtaaaccccgrgtgggtctgctctgcgtccgtcgagcytgctggaggggcggcttcgttccggttcggccttcctsggttccgaccgcggggacccgggcggaggcggggctggctgctgagctcgtgccacgcgctgttctcacgacggtgggggcggagggcgcgggagccggagctcctcagasccggcgggaccccaggcgcaccctggagctgcagacccccggccccgtcccacggctagctgaatcgtgagatcctggctcagggacgctcagctggtcagcagtcctattgggasctgtgacaacttagggcttctggctaccgaaactatcttcatttccacttaaaaagtatacgatttagctagaaacgaacgagttgtgaccgcagctttccacttttggtttatttgaattggtgtctcttcctggcgtctactgatacttggtcagggaatataaaattaatttwcttatccaasaaccgaaaaagsatataattatttttaaaaagtaatctgcttcaaggtcaagaacatgattttctaattaactgctgtttttggtttcatagtcacactttcttcatgggcccgaataattgaatagaccgtgtgtaatgaaatttacatttgaaatgtgaataaaataatttttgcagtcttggaaattttgaggtcccaaatttatttcgtatgccacacaagaactttcatgcgcgtccgtgtgaagagaccaccaaacaggctttgtgtgagcaataaaagcttttaatcacctgggtgcaggcgggctgagtccgaaaagagagtcagcgaagggagataggggtggggccgttttataggatttgggtaggtaaaggaaaattacagtcaaaggggagttgttctctggcgggcaggagtggggcaaggtgctcaggggagctttttgagccaggatgagccaggaaaaggacttttacaaggtaatgtcatcacttaaggcgaggaccggccattttcacttttgtggtggaatgtcatcagttaaggcggggcagggcattttcacttcttttgtgattcttcagttatttcaggccatctgggcgtatatgtgcaagtcaccggggatgcgatggcttagcttgggctcagaggcctgacaagaacagaatttgtgaattgcattttatttctcataagaagtatttgtttagattgttaaaagtaagaaattggattgttgagagtaggcagtcttctcaattttaacttccgcatgtctttgcagttgacggtattgtcwgtttttaaaaatttcttatttcagattaatcctaaatccttgagattgtggattattgaatagccrtatatggtatatacgacattttggataattctgttttaacctggttctttggttaatcatgttatttgcttaaccaggtctcccattcctggcaagttttcattggaggagaagcagtttatatagttttcaaatttctcaccacaatctcttctagaaggaagacagaataaatacaaaatcaatgctttgtggtggtggttttttttttggaaaacatttatgcatgttttaaatttatatatttcttcatataaatstaattgagttgtataactgctgtgaatttgtacattatcggaacctatgattgtccctaatttatgcaataactttgtatccaggcttctcgtttaagcagtggttctcaactggggtgatttttgccccgcaggagacatttggcaatgtctggagacatttttgattgtcatgccttgcagaggggcagttctattggcatctaatgtgtatagaccagggatgctgctcaatgtcctgtaatgcacaggacagttctcaacaacaaagaattatctgggctgggcgcggtggcttactcctgtaatcccagcactttgggaggccgaggcgggcgaatcacttgaggtcagkaattcaagaccagtctcgccaacgtggtgaaaacctgtctctactaaaaatacaaaaattagttgggcgtgtggtgcgaaaaaaaaaaattctctagcccaaaatgtcagcatcaagtttgagaaatccagagttgatttcatgccttcatttattcatttagcaagcatgyattgagtgcttgtaatggatgaggcactgtttcactattttatgtctttgatttgcagttttgtttctgccacattttaactgagaaacatgcattctaaaatgttgagttggattggcccattactttttttaaagtgaggtttaataggatacaatttacataaaataaaattcaccctttttgtaaatttattgtgatttgaaaatactaaaattcatgattygaatttgtggtaggagaagtgttttatgtggaactggcagttatttagttgataaaagaagaaataatatttagtagtagaacatgataccttaaggcttttaaaatcttgtgttctcagatgtataccatggagttatattccaatatggtcttacaaatcattttatctctttttttgtcttttgttttttgcttttttttttttttcaatacaagaaatctcctttacagacaataggtgaagaacaaacccagaatccctacactgaactgctagtactgaaggctcatcatgatattgtacgatttctggtacagttagatgactacaggtaagaagctatagtggtctaattgactattgtttgggaagaggttttagggaattttatgttaaacacctttaaaattaatacatcttttctaaaaatttaaaaactgtgatcattagtaacatttagtagaaattgaaattggcctctgcatctcgatgaaatatrtatctagagtcttttttgcccaaagtcagggtgtcgtgtctggtgatttgagggttatgtttgtttgtttgcattctcagaaatattcttaatagtttaaaagaagtgtatgactttaaaatttgggtaggagttataacagtatattaaggagaacttgtatttgagaaacaaatatgctaagtgtttaagtatcaggtacctaccaggaatgttttatttttagtggaaggtaagtttaatccaaagtttttgttattgatgaaaccacttgaaaatgtacattattctgtacttccttgctaacatgtataataattatgtttaatatatttgcaaatagaggtgaaggtgtataggctttaggactgtagactattactgatatgtatatatgtatattaagcccatattcaactgtatatcttttatagcatgtttcaccataataattacataattagtggtgtaattcaatattttcgtcctctctaaaatgtaagcttcatgagaatgaggctatgtttttcttattcaccatgttttcttagtacctagtacagtgccttacatgtagcagataattcatagatggtggctgagtgaatgaatgactctccagactactaagcatccacattgaatgccgtcctaatccccyaacctcatttctgttgtctctactagtttttccactttcatctctaattttgtcttttgcctttgctgttttttttcactccatggatgagtgttactgtaattattcctaactctgaccaccacttctgctgtctattaaccttgtcttttctctgcttttttttttttaatttaatttaatttttaaaatagagacagggtctcactatgttgcccaggctggtgggcaactcctgggctcaagctgtcttcccaccttggcctcccaaagtgttgggattacaggcatcagccaccgtgctcagccttctctctgctctttaaatgttactgatatttagttgctttaccatgtgcagtgcagttctgacattacctggacttaggtcagattccacagatgaagggcatagtctatacagcacccctcactggagacactagctgcaagccatgtatgggtttgtaggccacttgcatttccagctgctggctacaagttcctgctgttccctcaggtctgataattcactagaaggactcacagaactgaggaaagcactatacacaggattacagttttattataaaagatacaaattaggaccggccaaatgagaggatgtatatagggcaaggcctagggggtcccacatgcaaagcttccatgtctcaagactcctcgccctcttggaacatcagtgtgtatcaccaatgaatgagcacacttgagctttgggtgtccagagctttcattagtaggcatgattgtttgaatcattggtcacataattgaactcaatcttcagtccccaccctccccaccgtgactggtagcagaaagcccaaacctttaaatcatgtggttcatttttccaccttggccagcccctttcctgatgttatctcagggcccactgtgagttgttcctttagtataaacttaggtgtggtccaagggacccaccatgaataatgaagacattcttaccacttggaaaattccaaggatttagagactcccttctaggaaccagagacaaagtccagcaaagttattaaacagtaccatgcttcttaacttttgcttgaaaagatttgtctcatatatattactggcctgtcatcactgttttcctgttgtgatgcaagtcaaccaaatcatgscatgttaaacaatcatctgcagccttttttttggcaatgttacttgttgctatgtcctgagagacactccatttattaaagtggtcatttttgtggggaactaattatttctggaaaggtaagattttggacagctaaagttttcttgcgctatattttaccctagtaagttgctagattaaagaaaatctgataatttcttataatcactaatacttgggtgttaaggaatcctaaagttattttgtccaggaaagttaaataataaatacacagtatgtgatcaggttgtggactttaaatatttgtataaattgttaagagatcatgttcattgctgtctttcctctgtgaaatatcctcttggctattcctatcccatagttagaagaggactctgtagaagaggccagcctatagaataatggttagtgtacaaatgctgacatatatttggtttaattttccccacagtggtgctcacatatactttagttgtttaatgatagagtaaatattctgtaaagagtaaaaagccatatgtgggtatgttagttaccgattgctctgtcagctgtcacaccaaacttagtggcttaacacaaccccatctatttakctcattattctgcaggatggcaattsgggctaggctcagctgggtgagtctgtctttgcaccaggagcaactgatcttggctagattcacttatgcctctgtcagctggtagattggcgggggctggctggttcatttcagctgaaggtctcagctgaaatgactgtggtctccctccatgtggtttttcaggtgcttgttcacataatgatcatggagttctaatagcagcagaagggcaagccccaaagtaagacacttttcaagtctcagcttgcctcgtgtttgctgctgtttcgtcagccaaagcaagttaggagctggcacaaattcagtgagtgggtaaataaacttgacctctcatggtagaagtaactaagtcctattgctaatggtggtggcaatattgggagggggaataayttgtggccagtttgtgatctaccacagtgagtctaagatagatgaagaagcctgctttttggcttttgtaatacagtgatgatatgacttcatgattcacatttaattctttgaaaagtcatcaaatttacatataatcaactatgaagtttttcggtcatttgctgacctgtagaactttcagtctgtatgttgtttttaaaaatttaattctgtagtgtactaaaaaagaaaaaccgaaagagtcatcttcgtaagaaggacacaggaaaatctacaaagtataaacattatgaacagaattaaccgaatgtttttactcttaatagtttagaattatctttaccattgcatatgtacattatgcattgtcaaattagagaaatacctttccagttttaaaattttatatcattatcctttttttgtttcttagtttttgaagacattacaytctgggttttttttggtcagctgttataatccaggtttcacgcttcaagtctttagataatawcatcttattgaaaattttgcagaaggattttcttgttttctcagtggctcagctaaaatcagtgagtggaaaattttctcggattggtttttgaagatacccaataaatcctgtataacctaacagacagctgccttttcttttcttctttagtattttttgaacatgaagtgagggtcgtattgatgagagatcactaaagaaggttaagcctcagcaaaagtcttccaaaaaatgggctgtgctaaaattkcatgtaatactctagcgtttgacacattaaactaaactgagttcataacacattttaagaagagttttctccgttgctcatttgaccattccttgctccttcaggaaacagacaaggttatgtaggatggtgatcatgactggaaargaatcagatgacccatgatgaagtgccagattggagaacaaaatgtgcctctaggatggttggtgaagctgtacattcacaagaaagtaaataaactcagtatagcttgataatccactaaaaatgaacaatatgctcattttaaaggaaatattctcaagctaaacatattctttcttatacactaaccttcagagaacagaaatcagtatagtttagatcctaggatctgggttccctgggaaacagatagtcagtatagatccttctagtacctgggttccctgggaaggagacactaaaatggagacactaagcatgcaataggtttataagagagaaagccaatgaaaggagaagggaggaagcagaattggataaggggagctgtctcagactctgatgcagatgtgacaaagtttctgccagcccaatggggaccgctggaggaaaggctgctttttaagagttctctactggatgtaaataactagggctttgtactattgccttgcttagttatttgctgagggtccttcatgaagaayatgcacctggcttctactatctkgcttaaatcccagtgactaggagccgattgagctagtataactttggcttgaaggcagaaatggatcctgaagtcaacagctggaggcagtcagataactatattcctcacagctgggcagtgagtcctgtcttgaaagggggtctggaaggcaggtattggcgtctgccacacttccatagttgtaagttggtctattttatttttaacttgcatgaacatactcatkggctatgtctttgggcagctttttaagraactgtaagtatgccattggttaatagttatttgatggcttgaaaaagttaatatttttagagctattaacgtacttatgcctggaaaaaagggtataaccagaatcctttttatcacaaattccagcagctacaatattaataacagactccatatctggcatttttttaaagcacttatatccagtgtgacgttgactttagacaactttattatagtaaattttactaaaatctgttaaccaaatagcttttctwtttctaaaggcccctaatccaccatgtgtggtgaatgtgttgattgaatttctgttgttttgcatcgtgccctgaatcaagcggggaatttcggcagtgtcatcacacagatgcgtgtgccacccttgctgcttttctccttatttctaataattttgtcctttcagcttgtgttttggagctgtagctgagtttygtttagttggataagatgttgcagggtttgggaggatgacaggagtgagtgaaamggtaattgctgcttcatgcattagcatagaatcaaattttaggataaggacagcaagtgtctaacagtatttcagtttcaaatttgtcatcttagcagtaaaactctaatttctagataaaatcagtctctctcaactacaaaatacccttactctaggcatttgaaaattattttcttgaacatctttcaaatgtagctttaaaaatccatctggcaacttgagcatagatayaggaagtaactgcaatgaattgcaacatatcacatatgtttaaatccatgtgttcataatgatacttaaaaaagagaactcacctttggagaatgctggggaactaactcattctgttgaaaatcggtaaataaaagggcagagtcaaaatctrtactgcctttcttatataaactgtgtcttgggatcagtaataattgacgagaagaaatttctctgaagaattcaagctaggaagaatgatagaattagaatattgtaattttgcaacctctaatgtgtagaggaggaaaacacttttcttctacctatcttagattcattgatcagggctctacaacttagacatacaaaagacaggttaatgagcgaaaaagaagtatatcaatgcatacgttgcatacacacacacacacacacacacacacacacacacacacgagtattcargtaactcgtaggggtggttaaaacttgggcttaggctgggcacggtgactcagccctgtaatcctaacactttgggaggctgagatgggaggattccttgagctcaggagtttgaggctagcgtgggcaacatggcaaaaccatgtctctattaaaaaatacaaaaattagctgggtgtggtggtgcacacctgtggtccaagctacttgggaggctgaggtgggaggatcaccttagctcaggaggttgaggctgcagtgagctgtgatcggggccactgactgtagcctggatgactgagtaagaccctgtctcaaaaaagaaaaataaaacttcagcttatatagcatcttagcagaacaagaaatttgttgagtgacaagacaaaggaaatggactttgagtttcttggggtggcaaattgtgagaaggcaaatatatgatggaaactgctggtagagaagggctcattagtgaggttggtttgtgtaaactcttggtgccatctcatctgtgataaaggttgttatccccctcctggtatgggagtgggggtggaggttccgggggcactttcccaagggtgatgtgtgctttttttttttttttttcaggtagatgtggggaggacagagctcattctgtgcctgcattttctcagttgccttaagctgaaaataatcattatgtcagagtggcatagtttggggttatgtgctctgaaccccttcaaatgaaataatgaatttagatggcctaaatcataacatatacacatacacacacaagatagccagaaattatayttcckgatggagtatacaatctgcctttggggtggtcttaccaaaaagtcagatatggatcttatttagtctctagatttaactatcaattaacaaaaaatacagaggacagaggtgcatgttggataacagcacaggaaaaaaawcccagactgtgagaactcgacaagacaggtgaatttttttttcaacaaataaattrcaaggaaaaacagatggagaaaaaaatcattagaataaaagagatattagagataaatcaaccaagtgtactatagaagccttatttggatccttctaactgtttaaaaaattacgatcagctaaatttgatcattgactgrgtatttgatgacattaaggaagtaaatgttaacttagrtgtgatgtaaaagagtccttagagatgcattctgaaatactgacaaaatgaaatacagtgactaggatttgcttcaaaataatttacagaggggttggactgggtgcagataagacactagtggccataaattgataattactagagacaggcaatgagtacatgtggctttttattataatgcccttctctccacttttgtatatatttaaattctccgtaatgaaaagttaactatctgtatttgaaatagaggaaataaaaatgccaatttaaaaggtatttatgcctctgtgaaataaaatgttttcttagatattgctagtgttctgagtgttcagtggagaaccacccttgtttctctttgagaacagaatttattgagaatagttgtaggaatcatacagatgaacatgaacatatcagcttcataaagtaataaccgatacaaaactggattaccagatatggctcttttttttttttttttttttttgagacggagtctcgctctgtcgcccaggctggagtgcagtggtgtgaccttggytcactccaaccaccgcttcccaggttcaagcgattcttctgcctcagcctcccgagtagctgggactacaggcatgtgccaccacaccgagctaatttttgtatttttaatagagacagggtttcaccayattggccaggctggtctcgaactcctgatctcgtgttccgcctgcctcggcctcccaaagtgctgggattacaggtgtgagctaccaaacccagccaggatgtggctttaatatgtacccacagtggatttccttaacacttcaccctgagtcaagtagactatttcaatgaatccctggggcaactgaagagttgccagcctcccattcagatacaggcttacctcaaaaataagagcagaccagtatgttccctctctgtgaacagatgaatcttcagaaaacccacaaggggcygggtatgatggctcatgcctgtaatcccagaactttgggaggccaaggcgggtggatcacaaggtaaggagtttgagaccagcctgcccaacatggtgaaactccatctctactaaacatacaaaaatcagccatgcgtggtcgtgggtgcctgtaatcccagctgaggcaggagaatcgttagaacctgagaggcagaagttgcagtgagctgagatcacgccattgcactccagcctgggcaacagggcgagactttgtctcaaaaaaaaaaacaacccagaaaacccacaagggtctgaactgagcatgcctaattcattgtctcaagcaagtggsgcagagagagaccaagaatgtttctctagtagtrggagtcctccatggaaacttgagtgcaggggaatggaggttcacctaatagaagtcacacagakttttttggtattctaatactgtaatctttttttttttttttaattatactttaagttttagggtacatgtgcacaatgtgcaggttagttacatatgtatacatgtgccatgctggtgcgctgcacccactaactcgtcatctagcattaggtatatctcccagtgctatccctcccccctccccgcaccctacaacagtccccagagtgtgatgttccccttcctgtgtccatgtgttctcattgttcagttcccacctatgagtgagaatatgtggtgtttggttttttgttcttgcaatagtttactgagcatgatgttttccaatttcatccatgtccctacaaaggacatgaactcatcattttttatggctgcatagtattccatggtgtatatgtgccacattttcttaatccagtctatcattgttggacatttgggttggttccaagtccttgctattgtgaatagtgccgcrataaacatacgtatgcatgtgtctttatagcagcatgatttatagtcctttgggtatatacccagtaatgggatggctgggtcaaatggtatttctagttctagatccctgaggaatcgccacactgacttccacaatggttgaactagtttacagtcccaccaagagtgtaaaagtgtttctatttccccacagcctctccagcacctgttgtttcctgactttttaatgatcgccattctaactggtgtgagatgatatctcattgtggttttgatttgcatttctctgatggccagtgatggtgagcattttttcatgtgttttttggctgcataaatgtcttcttttgagaagtgtctgttcatgtccttcgcccactttttgatgtggttgtttgtttttttcttgtaaatttgttggagttcattgtagattctggatattagccctttgtcagatgagtaggttgcgaaaattttctcccattttgtaggttgcctgttcactctgatggtagtttcttttgctgtgcagaagctctttagtttaattagatcccatttgtcaattttggcttttgtagccattgcttttggtgttttagacatgaagtcctygcccatgcctatgtcctgaatggtaatggttaggttttcttctrgggtttttatggttttaggtctaacgtttatgtctttaatccatcttgaattgatttttgtataaggtgtaaggaagggatccagtttcagctttctccatatggctagccagttttcccagcaccatttattaaatagggaatcgtttccccatttcttgtttttgtcaggtttgtcaaagatcagatagttgtagatatgcggcrttatttctgagggctctgttcttttccattgatctatatctctgttttggtacsagtaccatgctgttttggttactgtagccttgtagtatagtttgaagtcaggtagtgtgatgcctccagctttgctcttttggcttaggattgacttggtgatgcgggctcttttttggttccatatgaactttaaagtagttttttccaattctgtgaagaaagtcattggtagcttgatggggatggcactgaatctataaattaccttgggcagtatggccattttcacgrtactgattcttcctacccatgagcatggaatgttcttccatttgtttgtatcctcttttatttcattgagcagtggtttgtagttctccttgaagaggtccttcccatcccttgtaagttggattcctaggtattttattctctttgaagcaattgtgaatgggagttcactcatgatttggctctctgtttgttgttggtgtataagaatgcttgtgatttttgcacattgattttgtatcctgagactttgctgaagttgcttatcagcttaaggagattttgggctgagacagtggggttttctagatatacaatcatgtcatctacaaacagggacagtttgacttcctcttttcctaattgaataccctttatttccttctcctgcctaattgccctggccagaacttccaacactatgttgaataggagtggtgagagagggcatccctgtcttgtgccagttttcaaagggaatgcttccagtttttgcccattcagtatgatattggctgtgggtttgtcatagatagctcttattattttgaaatacgtcccatccatacctaatttattgagaatttttagcatgaagtgttgttgaattttgtcaaaggccttttctgcatctgttgagataatcatgtggtttttgtctttggttctgtttatatgatggattacatttattgatttgcgtatattgaaccagccttgcatcccagtgatgaagcccacttgatcatggtggataagctttttgatgtgctgcyggattcggtttgccattattttattgaggatttttgcatcagtgttcatcaaggatattggtctaaaattctctttttcggttatgtctctgcccggctttggtatcaggatgatgctggcctcataaaatgagttagggaggattccctcttttactattgattggaatagtttcagaaggaattgtaccagttcctccttgtaccactggtagaattcggctgtgaatccatctggtcctggactctttttggttggtaaactattgattattgmcacaatttcagatcctgttattggtctattcagagattgaacttcttcctggtttagtcttgggagggtgtatgtgtcgaggaatttatccatttcttctagattttctagtttatttgcgtagaggtgtctgtaatattctctgatggtagtttgtatttctgtgggatcagtggtgatatcccctttatcattttttattgcatctatttgattcttctctctttttttctttattagtcttgctagcggtctatcaattttgttgatcctttcaaaaaaccagctcctggattcattaattttttgaagggttttttgtgtctctatgtccttcagttctgctctgattttagttatttcttgccttctgctagcttttgaatgtgtttgctcttgcttttctagttcttttaattgtgatgttagggtgtcaattttggatctttcctgctttctcttgtgggcatttagtgctataaatttccctctacacactgctttgaatgtgtcccagagattcttgttctcgttggtttcaaagaacatctttatttctgccttcatttcgttatgtacccagtagtcattcaggagtaggttgttcagtttccatgtagttgagcggttttgagtgagtttcttaatcctgagttctagtttgattgcactgtggtctgagagacagtttgttgtaatttctgttcttttacatttgctgaggagtgctttacttccaactatgtggtcaattttggaataggtgtggtgtggtgctgaaaacaatgtatattctgttgatttggggtggagagttctgtagatgtctattaggtctgcttggtgcagagctgatttcaattcctgggtatccttgttggctttctgtctcgttgatctgtctaatgttgacagtggggtgttaaagtctcccattattattgtgtgggagtctaagtctctttgtaggtcactcaggacttgctttattcatctgggtgctcctgtattgggtgcatatatatttaggatagttagctcttcttgttgaattgatccctttaccatgatgtaatggccttctttatctcttttgatctttgttggtttaaagtctgttttatcagagagtaggattgcaacccctgcctttttttgttttccatttgcttggtagatcttcctccatctttttattttgagcctatgtgtgtctctgcacgtgagatggrtttcctgaatacagcacactgatgggtcttgactctttatccaatttgccagtctgtgtcttttaattggagcatttagtccatttacatttaaagttaatattgttatgtgtgaatttgatcctgtcattatgatgttagctggttattttgcttgttagttgatgcagtttcttcctagtctcgatggtctttacattttggcatgattttgcagcrgctggtactggttgttcctttccatgtttagcacttccttcaggagctcttttagagcaggcctggtggtgacagaatctctcagcatttgcttgtctgtaaagtattttatttctccttcacttatgaagcttagtttggctggatatgaaattctgggttgaaaattcttttctttaagaatgttgaatattggcccccactgtcttctggcttgtagagtttctgccaggagatccgctgtgagtctgatgggcttccctttgagggtaacccgacctttctctctggctgcccttaacattttttccttcatttcaactttggtgaatctgacaattatgtgtcttggagttgctcttctcgaggagtatctttgtggcgttctctgtatttcctgaatctgaatgttggcctgccttgctagattggggaagttctcctgtataatatcctgcagagtgttttccagtttggttccattcttcctgtcactttcagttacaccagtcagacgtagatttggtcttttcacatagtcccatatttcttggaggctttggtcatttctttttatttttttttctctaaacttcccttctcgcttcatttcattcatttcatcttccatcgctgataccctttcttccagttgatcgcatcggcttctgaggcttctgcattcttcatgtagttctggagccttggttttcagctccatcagctcctttaagcacttctctgtattggttattctagttatacattcttctaaattttttttcaaagttttcaacttctttgcctttggtttgaatgtcctcccgtagctcatagtaatttcatcgtctgaagccttcttctctcagcttgtcaaagtcattctccatccagctttgttccgttgctggtgaggaactgcgttcctttggaggaggagaggcgctctgctttttagagtttccagtttttctgctctgttttttccccatctttgtggttttgtctagttttggtctttgatgatggtgatgtacagatgggtttttggtgtggatgtcctttgtgtttgttagttttccttctaacagacaggaccctcagctgcaggtctgttggagtacccggccgtgtgaggtgtcagtctctcccttctggggggtgcctcccagttaggctgctcgggggtcaggggtcagggacccacttgaggaggcagtctgcccgttgtcagatctccagctgcgtgctgggagaaccactgctctcttcaaagctatcagacagggacatttaagtctgcagaggttactgctgtctttttgtttgtctgtgccctgcccccagaggtggagcctacagaggcaggcaggcaggcctccttgagctgtggtgggctccacccagttggagctttctggctgctgtgtttacctaagcaagtctgggcaatggcgggcgcccctcccccagcctggctgctgccttgcagtttgatctcagactgctgtgctagcaattagcgagactcygtgggcgtaggaccctccaagtgaggtgcaggatataatctcctggtgcgccgttttttaagcccgtcggaaaagcgcagtattagggtgggagtgacccgattttccaggtgccgtctgtcacccctttctttgactaggaaagggaactccctgaccccttgagcttcccgagtgaggcaatgcgtcgccctgcttcggctcgcgcacggtgcaygcacccactgacctgcgcccactgtctggcactccctagtgagacgaacccggtacctcagatggaaatgcagaaatcacccgtcttctgcgtcgctcacgctgggagctgtagaccsgagctgttcctattsggccatcttggctcctcctcctactgtaatcttgatgtgtagtttagctttctatctgtgatttgggaagggaagaacttaccaaatgttttacctttgcaaataaccatgggaactatgcaatctttgtttgtgagctaaaaaaggaccttagacttttagatgttagagtcatgttaatataatacattcttttttaaggaaaagaaattgttgaagtagatctaattaaggaattggttgcgtcagcatctatggctcctgaaaatgctttgacgtttccttcaactsctttacaagtccctatctggatgcttctctaattttcttcaagtagttctagcatacaaacatatactttaaatgaaaattgtgattttttttgttgttatactttaagttttagggtacatgtgcacaatgtgcaggttagttacatatgtgtacatgtgccatgttggtgtgctgcacccagtaactcatcattttaacattagttatatctccaaatgctatccctccccactccccccaccccacaacaggccctggtgtgtgatgttctccttcctgggtccatgtgttctcattgttcagttcccacctatgagtgagaacatgcggtgtttggttttttgtccttgccatagtttgctgagaatgatggtttccagcttcatccatgtccctacaaaggacatgaactcatcatgttttatggctgcatagtattccatggtgtatatgtgccacattttcttaatccagtctatcattgttggacatttggkttggttccaagtctttgctattgtgaacagtgccrcaataaacacacgtgtgcatgtgtctttatagcagcatgatttataatcctttgggtatatacccagtaatgggattgctgggtcaaatggtatttctagttctagatccctgaggaatcgccacactgacttccacaatggttgaagtcccaccaacagtgtaaaagtgttcctgtttctccacatcctctccagcatctgttgtttcctgactttttaatgatcgccattctaactggtgtgagatggtatatcattgtggttttgatttgcatttctctgatggccagtgatgatgcrcattttctcatgtgtcttttggctgcataaatatcttcttttgagaagtgtctgttcatatcctttacccacttgttgatagggttgtttatttttttcttgtaaatttgttggagttcattgtagattctggatattagccctttgtcagatgagtagattacaaaaattttctcccattctgtaggttgcctgttcactctgatggtagtttcttttgctttgcagaagctctttagtttaattagatcccatttgtcaattttggcttttgtagccattgcttttggtgttttagacatgaagtccttgctcatgcctatgtcctgaatggtattgcctaggttttcttctagggtttttatggttttaggtctaacatttaagtgtttaacccatcttgaattaatttttgtagaaggtgtaaggaagggatccagtttcagctttctgcatatgactagccagttttcccagcaccatttattaaatagggaatcctttccccatttcttgtttttgtcaggtttgtcaaagatcagatggktgtagatatgcggcgttatttctgagggctctgttctattccattggtctatatctctgtttttggtaccagtatcatgctgttttggtaccagtatcatgctgttttggttactgtagccttgtagtataatttgaagtcaggtagcctgatacctccagcttggttcttttggcttaggactgacttggcaatgcgggctgttttttggttccatatgaacgtgaaagtagttttttccaattctgtgaagaaagtcattggtagcttgatggggatggcattgaatctataaattaccttgggcagtatggccattttcacgatattgattcttcctacccatgagcatggaatgttcttccatttgtttgtatcctcttttatttcattgagcagtggtttgtagttctccttgaagaggtccttcccatcccttgtaagttggattcctaggtattttattctctttgaagcarttgtgaatgggagttcactcatgatttggctctctgtctgttattggtgtaaaagaatgcttgtgatttttgcacattgattttgtatcctgagactttgctgaagttgcctatcagcttaaggaggttttgggctgagacartggggttttctagatatacaatcatgtcatctgcaaacagggacaatttgacttcctcttttcctaattgaataccctttatttccttctyctgcctaattgccctggccagaacttccaacactatgttgaataggagtggtgagagaggkcatccctgtcttgtgccagttttcraagggaatgcttccagtttttgcccattcagtatgatattggctgtgggtttgtcacagatagctcttattagtttgagatatgtcccatccatacctaatttattgagagtttttagcatgaagagttgttgaattttgtcaaaggccttttctgcatctgttgagataatcatatggtttttgtctttggttctgtttatatgctgaattatgtttattgatttgcgtatattgaaccagccttgcatcccagtgatgaagcccacttgatcatggtggataagctttttgatgtgctgctggattcggtttgccagtattttactgaggatttctgcatcaatgttcatcagggttattggtctaaaattctcttttttggttatgtctctgcccggctttggtatcaggatgatgctggcctcatgagttaaggaggattccctctttttctgttgattggagtagtttcagaaggaatkgtaccagcttctccttgtacctctggtagaattcggctgtgaatccatctggtcctggatttttttttggttggtaagctattaattattgcgtcaatttcagatcctgttatyggtctattcagagrttcagcttcttcctggtttagtcttgggagggtgtatgtgtcaaggaacttatccatttcttctagattttctagtttatttgcrtagaggtgtttttagtattctctgatggtagtttgtatttctgtgggattggtggtgatatcccctttatcattttttattgcgtctatttgattcttctctcttttcttctttattagtcttactagcgttctatcaattttgttgatcttttcamaaaaccggttccgggattcattaattttttgaagggttttttgtgtctctatttccttcagttctgctctgatcttagttatttcttgccttctgctggctttcgaatgtgtttgctcttgcttttctagttcttttaattgtgatgttagggtgtcaattttagatctttcctgctttctcttgtgggcatttagtgctataaatttccctctacacactgctttgaatgtgtcctagagattctggtatgttgtgtctttgttcttgttggtttcaaagaacatctttatttctgccttcactttgttatgtacccagtagtcattcaggagcaggttgttcagtttccatgtagttgaacggttttgagtgagtttcttaatcctgagttctagtttgattgcactgtggtctgagagacattttgttataatttctgttcttttacatttgctgaggagtgctttacttccaactatgtggtcaatattgaaataagtgtggtgtgatgctgagaagaatgtatattctgttgatttggggtggagagttctgtagatgtctattaggtctgcttggtgcagagctaagttcaattcctggatatccttgttaactttctgtcttgttgatctgtctaatgttgacagtagggtgttaaagtctcccattattattgtgtgggagtctaagtctctttctaggtctctaaggacttgctttattcatctgggtgctcctgtattgggtgcatatatatttaggatagttagctcttcttgtgaattgatccctttaccatgatgtaatggccttctttgtctcttttgatctttgttggtttaaagtctgttttatcagagagtaggattgcaacccctgcctttttttgttttccatttgcttggtagatcttcctctatccctttattttgagcctatgtgtgtctccgtgcatgagatgggtttcctgaatacagcacactgatgggtcttgactctttatccaatttgccagtctgtgtcttttaattggagcatttagccyatttacatttaaggttaatattgttatgtgtgaatttgatcctgtcattatgatgttagctggttattttgcttgttagttgatgcagtttcttcctagcctcgatggtctttacaatttggcatgtttttgcagtggctggtatcggttgttcctttccatgtttagtgcttccttcaggagctcttttaagacaggcctggtggtgacaaaatctctcagcatttgcttgtctgtaaagtattttatttctccttcacttatgaagcttagtttggctggatatgaaattctgggttgaaaattcttttctttaagaatgttgaatattggcccccattatcttctggcttgtagagtttctgccaagagatctgctgttagtctgatgggcttcccttygwgggtaacccgacctttctctctggctgcccttaacattttttccttcatttcaactttggtgaatctgacaattatgtgtcttggagttgctcttctcgaggagtatctttgtggcgttctctgtatttcctgaatctgaatgttggcctgccttgctagattggagaagttctcctgtataatatcctgcagagtgttttccaacttggttccattctccctgtcactttcagttacaccaatcagacgtagatttggtcttttcacatagtcccatatttcttggaggctttgtttctttttatcctttttttctctaaatttctcttctcacttcatttcattcatttgatcttccatcactgatacccttagcattttttcaatgttattttattgtaaatgtaataatgacttcaggcagtgattattgatgggtgttaacatcacacacacgcaaaaatgactgccagaaatttgtttcctaatggagtatacaaactgcttatgaaatggtcttaccaaagagtcagatttgaattggattaagtctgtagatttaaggatcagttttctaaaaatacagaatacagaggtgcatgttagatgacaacagaggaaagtagtcagcaaaatctgggctgtgagaattatacaggagagacaactagggtacatgtgcacaacatgcaggtttgttacatatgtatacatgtgccgtgttggtgtgctgcaccgattaactcatcatttacaktaggtatgtctcctaatgctatccctcccccctacccccaccccacgacaggccctggtgtgtgatgttccccttcctgtgtccaagtgttctcattcttcagttcccacctatgagtgagaacatgtggtgtttggttttttgtccttggcgatagtttgctgagaatgatggtttccagtttcatccatgtccctacaaaggacgtgaactcatccctttttatggctgcatagtattccatggtgtatatgtgccacattttcttaatccagtctatcattgatagacatttgggttgaagagagacaacttttttcaacaaaaagattgcaaggaagaaaaagatggagaacaaaaccatagaaaaaagagactttagagatatatcaagcagttgtgctatatagaccttatttagatcctgcgtcttactgtacaaaaaaaatgatgagatgatcatggaaactgtatagtattttagttttatcatgcattagaaagtacttgcaggttaggtggaaagttaaccactggggtgcctgtactgccataataatgtcgtattaagatttttattttttcagtgccttatgtagacattgaatacaggaagatttatggttcaggtttatggactatactttttatgtcctttaaggtaacatttgaatttttgggaccttcacttagttgaarggccttcwcatgagtaagaactattaaatgagcatttagctattggacataagaattattgtgaaaacaatttattttttacaaatctttattaagctttgctgtagttttcagcccactgttggaaggaacgagagaatactttctcagagatgttcaaagagaagatgtttagagggaattatttttatacattaagatggttgtaagtgagaattctctaaggactcatgatctagaccctatagcatcacatggtaatgttggactgtgagttcttgaatggcaagaacaatctcttgatctttattcttaggtttaagcatctatatagttagtgcttagtaagtattgaattaccgagtgacttatggactatcataataaatttagttctcataattaggggatgagaggatgaaacattctaggaggtctgccataggtctttgttaaaccatgtttcaccttgttgaacttgtttttcatgaatrtaagttttgcttagtcatttaattgtgtagtctcaaggagtatttttaacaacttgggttttttttgttttttgtgttttttttgagatggagtcttgctctgttgtccaggctggagagtggtgtgatcttggacttggttttaagttaaagaaaaaacctgaagtatatggataagaattggacaggaatatgaaaaaatatagaaatttatttttgtgtggtagggattctgggttttaaatttttaagtttctattttttgtggtagtatatttacattaattatgataaaaggaaaatatggggttacattgccatcattaatcaatctatttcacagagcccttgaacacttaaatgtttgcttatgcattcacttattcattcaacaagcatttctttagcacttaaaacctgccagagataatcagagattcattagactggcaagtgccatgttataaagataaagatcaataaatatggtaattcttagagttcatgattctaagaagcatatttttttctattttgacatctctaaaatttggacacatcatataattgtgtgtttcaattgtaattggcartatgttttccttaatggtaaataaaataagagtgtcttacaattgatgtcttagatttgatgaaatacggtacatttctaaacaatcataaagttttaagatctcaaagcaagaaccacatgtaaggtgtcttcacatttccctaactcctagcacggaatcacactgaatacattttttgctaatcggtaaagaaacatttctctcaaaatcttatctttaggcttaagtttttgctttctgttactttagaatgtttttaaaaattagtatgtaaaatgttatctggcaatattactattcttccattggatagaatagcttaaactttattgacattttaatcctttttttattttatagttcattacttcttttcagcagttacactataccttacaattaggaattcttgggttgtatttccatttctgatttggagatggttgaagtgtatgcttgactgactaggatttagtttaagataaactgataaagtatagctagttttttgttatccatsataataggatgggtaattgtaatttgtgaatgatatctcaaccctttattagtttttttatgacaggtactaatatgtgtcaaagttatactggtttgtattttaaagcttaatgtttcctctttaggggaggtagtaataaatactgaaatggcaaaaaaaaaaaaaaaatggtagcaatagaatatatataagaatagaaggcctgaataatctaccaaccaggtaattgaccttgcagcaataaaaaattgactgtgatttcatgcattactattgagccttatttagatttaacttttgttccctactgattgaattaaagtttgaggttaaatgctctatatcccatttctaaactctcagctgttctcagtcatctctcattgtgaactcatgaaagtcaaacatgataaaacaatcataagaagttaaaaattagggttagaaaaaragtatgtattttaaacttgctgtcttctaaatgcaattttaagtttaaagaatcaatagaaattgatgttttataccaaagaacacttaagaccttgagtcctgccctccccaccatcactatacaaataaaaagaaatcaataggcccagaaacataagctgctaaagatttatttccagcaactatttttgatattcaaggtactatttactaatctgattgagaaaatgtagataattaagcataggaaatctatttttattttaaaaatgatcattttctttttaatctccggatcttttatatgttacattttaaaataagaataaatgataggcatggatttaaaaataactctttgtgatttttagctagttacctaaatttaacaggtccattctgttaaaaagataggtagttctgtatttaaaaattattaaaagactgtcagactgtatttgatcaatttcatgtctcctgaataatcttggttctaccagtagtagatgtactcaaaggattttgaaataagaactgagtattggaattgtctgagccagtgaaggcactgaactttgaaactgaagataagaaatttgaacatgaaactcagtttggagtgttaaggaaagtatttcatgactgaaatagtgggattttgttatctcataaaggggtaaaaaatccattagaacagatgctcacatagcatctgttaattataaggggccagttatatgtcattcatagctggctctctttaacaccacttctttctctcatactgaaaaaaaaaaaagcctgaatttgagtgaaagcaatattatggggacaactttaaattgattctgagtcattaaaaattatttacaaacttgtggatgacattaacagtaaattatttgacatgcttatgatgtgattatttatactactttgttgsgttagtataataagatggtgaattttagtataatatggtgatgaataatcctgtatgacaggttattccttttgatagtgtttatgttcagaatatcttctactctacagaatttggtgattgtccctgtgatatggtgaatgggatataaaaaggagagagaagctatagcagactatcacagctcatttttcatgccataagacaagctttacctgtgcatttcaagcatcttcactaaaaagcaacaaaaaaaccctaaaaaatcctcaaatcttccaaaccaagaacaaagcatttatgtggaaagactaaggagttgagctgagcaaaagagagatcttgactttaaataataattatttacagagagaataatagaagtaatgaatttatttaacatcgtaatcacttcctagaatatcacttcctgtcactgaaggcacttgtcagcttggtttcatttcacttaagtcagggatttcttaaaatcatagaattttaaagcaaagaaggactttaaagattatttttacatttctagcagtttattctttgtaaacttataaatgtcttatttatcttttgatcttccatacctggtacagaagctggaatgtgtttcataaatattttttaaattagctgaaataacttgatcttcgttaatattagtcaaaataccactaataaggtttgatagttcttaatcttagtaattaaatgtcaccagtgatttttttttcttgaccctttctccctaaccagatttgcatctgctgrtgatgatggaattgtagttgtgtggaatgcccaggtgtgtattgattatgtgtggattgtgtgataaagatatgatgatgtagttgagtatgtattcatataaatactatctggggatacatttrcatatcactgttaattgacacattaatatttgaaaagagctaattaggataaatccatatacagtggggaccagtatttcataatgaagagggaaagtttttttaaattgagattttttttccagctgggtgtggtggctcgtgcctgtaatcccaggactttgggaggccaaggcgaacggataacttggggccaggagtttgagaacagcttggccaacatagcaagaccccgtctctactaaaaatactagaaatcagctgggcatagtggcacatgcctgtaatcccagttactcgggagactgaggttgcagtgagccgagaacatgccactgcactccagcctgggtgacacagcaagactgtctcaaaaaaaaaaaaaaaaaaaaaaagttttttcctaagaaacaartgccaaagtatgaaaattcaaaaaatacaaaattttaatcttatttaacaaaatttaggttatcactagctatgccctgacttccaaaatgaataaatgaattgtgttgatttttgtgagacacacaagttttctttcaacattgcgtaatagcataatgtaacatttttctcatgtttgacttaatattacaaaagccttttttttttaaataaatacttaaggcttcaccagtttcttcagagcctcccttcctgatcatttgttactcaaattattcttttttgaagtatcttcctctcaccttaattttggattgttatctagtctgactgtgtcasatctttatttttcaatggctttgcctgtgataaaatcagttctttaacattattttcaccacattcacgaagtcctgcaatcttggaaagatttgccatttacattgtatttttgcatgtttmctacttggtaaattagtcagagactgatggatgaagacaytggatgggtaggaatagatgttggtgttaaataacgatggagtggagactgactttctaagtggttaataaatgwgtggatatatatacttatttgtgtgtaggtacatatacagttgttatggtgacttttattttcttctatgaccttataactgtggagacttaaataacaaatacttggacaatgaggactccatatttttttcctgcaaactaagttactgatgtttttatgcttaatttacacaattatatttttaaatttatagaaaaaaatactcaaaattttctataaaaatatactaaaaattagcattttgttttagaaaataaaactatarttatggctgtactttcagtgcttgtttagattctgtgtgattgcttaagttaaattctgaataagtaattttaaatggaatgtatatgtatcttctatatggtagttgtacttaatgtagtcatttatgattatctaaattgtgaaagctaagcctattaacatttttattggtatttcagacaggggaaaaacttttagaactgaatggacacactcaaaagataacagctattattacatttccttccttggaatcttgtgaagagaaaaatcaactcatcttgacagcctctgctgatagaacagttattgtatcctttaatctggaagaaatgaacaagctgtagtggcctaaggagccactacatacactattagtctttagctgatagggtcttgtctgtatattcttgttatagcaaaaatgntttttgttctgttacttataagataccatttattaggtatctgaaaagtattagactggaaataggaggttaaggcttgttattgatggaaactccrtgactattgctgttctttccagagttactctatcaggttgtataaaattgatgaaatgggaaaatgtggacttaaaaataatttattttactatctcagtttgcttttcaatttagggaaacaacgatgagttggactggagaataatttacattytttttccccactatacagcagaagaaaccaaatggtcccaacccataaaaatctttggagcatctgagtctgatagaaaagtgaattactgtttgttcagtgtgtaatatttaataattaaaaacaattttataaaagtaaaattactttttctttacccatacttttaggtaaaaagttaagatgggatagcagtagtaaagtgcttatgtgtaacaggcattgttctaattgttttacatatattaactcatttaatctttaaaattagccctttgacataggtatttttaattctttttttttttttttttttgagacggagtttcactcttattgcccaggctggagtgcaatggcgtgatctttactcactgcaacctctgcctcctgggttcaagcgattctcctgcttcagactcccgagtagctgggattacaggcctgtgccaccacgcccagctaattttgtatttttagtagagatggggtttcactctgttggtcaggctggtctcgaactcctgaccttaggtgatccacccaccctggcctcccacaatgctgggattataggcatgagccactgcgcccggccttatttttaattattcttatttacagatgaaaaaaatagagtcacacagaggctaagtaactttcccaaggcacacagccagtgtagggcagaactggcaagtctgactgcagagtcagagccccgaaccactgcacttcataaaatgttttctgtaaacaaactcagccctttaatatctgtatgaggaattggcttggtgaagtccagagtcaagtgctatggataactgttgtctttcattacttttatttttttaaaagaggttgtcagattgatttttttttttttttagacagaatctcactgttgcccaagctggagtgcagtagcacaatctcggctcactgcagcctccacctcccaggttcaagtgattcttctgcctcagccacccaagtagctgggactacaggcgcctgccaccacgtccggctaatttttttgtatttttagtagagacggggtttcaccatattggccaggctggcctcgaactcctgacttcgtgatctgcccgccttggcatcccaaagtgctgggattactggcatgagccactgtttccggtcatattaatttttaaaagtatatgcttatctgaaagttctgtktaaacastttcaagcattggtgaagttttggagtaagcccaaaagtataggtgtttcttaggctcttacagaaccaagatacagacttgaacatgctttaaatgagttcatcaactgaagtgctttctagacagattgttcatagctgaaaaaatgtcaagaaaaggtttaaatggggataaactctctatacatacatacatatatacatacacacatatatgtatgtttgtgtgtgattatgatacartgtaaacaagggcataaaattctctcagatggttaggtcagagttgctttattactactctgtagaggcaaatatgggataaagctctctttttcagtatcagtgtaatcttygcaaaaatagaatttaaaatactctattagaccactcctaagacactatagcaatattttgaggcagtgattaaaattacatacagaagttagtagctggtacagtgtcactatgaattttacctgtaaatgatagtatggactcatttcctttgctgagtgatttttgttgttagaaaaaaattctaggccgcttatttggcagtctctcttacccaaatgaattctaaatttactctgcttgggtttttactacaggttgagcatccctaatctgaaaatccaaaatctgaaatgctccaaaatccaagaccttttaagcactgacgtgatgccacaagtggaaaatcttatacctgacatcatgtgacaggttgcagtcaaaattttgtttaacgcacaaaattaccaaaaatattgtataaaactaccttcaggctatatgtataaggtgtatatgaaaaataaatgaattttgtgtttagacttgggttcagtccccaagatagctcattaggtatatgcacatattccaaaatccaaaaaaaatcagaaacacttctggtcttaagcattttggataagggatacccaacctgtaaaaactaacttccttaattaaatactgaaggtagataattttttaaagcgatagccttaggagctcaggttactgaatattaaatgttctgcttgtgaatagtgaaataagtgaaaaggctgtgagatactactagaattctggtaaatataaggccagaaaacatttcctaattactgggagcattttttgtatgctagcagttttagtgtgttatatacataaaatgtaattctcatgataatctagctccatctaaagcatgacatagaatatagatggtccccaacctagggtggtttgacttacagtttttcaactttatgatggtgtgaaagggaggtgcattaagtagaaactgtactttgaattttgaagtctgatattttctcacactagtgatgcatgggatgatagtctttcccagtgctgggcagcagcagcctggagctgcagctccttcctagtcagctataagatcacaagggtaaacagccttactctacagtgtactgtgttgccagatgacttttttttttgcccaactataggcttatgtaagtgttctgagcacatataagttaggccaggctaagctatgatgtttgatagatgtgttaaatgcattttgacttaggatattttccacttagaatgggtttattgtgggacataactactttaagtcaaggcacatctgtataataaaaatataacaaaaggcattggccatgataaggttaactagtttrtgaaattagtttcaatttttaatacatgcatatacatttgtatacgtagtacatacatgtatgtaaatgtgttttcagacatggtgtaaaatgtatttcttactataggaaatggtgtaaaagtttgaaaatcactgtgcttaagtcaaactgaacttggatgttttatgagaggccctctgattatattaaatgcacatacaggtaatagtaatacactgttagtgtcttctcgaatcaagataacagtagtaaatcatgctatccatattatagggagctttcagtaaatattaatggacatgatagtttttggtataagtactttatgcttattagattatggtgggctattctggagaataaactttaaacagttggaatatttagtgcttgtaaagattcagtacttcagaccattcattatgttggcattttcaaataatttgatagtaaaatttacctcaaacttattttagattataagcctgctttgctaagttgatgactcactatatgaattcatttttgtggtggtataaacactaaatattttatgtttgatttaaagattttctaactgcttaacatttgtggcttaattgttaattagaaaagttataattaagattttaaaattctgtttagaaattatttcttaacataaatttaggtgtgggatggtgatactaccagacaagttcagagaatatcatgcttccagtctactgtaaaggtaaaatcttaagtaaatatgagtttttatgacaatctatttttgtcycagaagacatggtttaaagagttagacgaaattacttttgtgggtcttatgaattatttctttccacacacttgtagtcatttgcttcgtgtaagatcagatttttgagagcacatgtattaagtgttagaatgtttcmatttgaaattagagcaagggataatcccaatagcaagataaggaaaaaaggtagtacctggtatgttttttgtaggtagttccaggaagagatattacttgtagaatgaccataatagtagctggtctgttttctttatactttgaatttaaaatatagagctatttgtcccatgacctttgccttctctaaggtcacaaaggcaagacatgtcagttacttagtttcaaaactaaaaatcttacctggctaatttgctgttactgttaggtttattccttttacaaacaattattaattggggctaatgatatgacagaagctctgctacgttttagagaaacaaacatagataagacttggttgcttgtgattcctacagaaattaagtgttcagagaaagtgccactgttttttagtaatgtaagcaagttttggaaaagatagtagtagcagtagatgttccctcatttactttaaggataactgatctccatattggagctcttttcttttttttcttaatgtaaaaagaattgctgtgtgccaataggtagaatagttgatcttttcccaaaaaggcagaatctctggtagccatctcatggcactgtgctgttcaaaatatcaacttagtcaagtttcaggggaagaaagtgccatgtactatatatacttytatctaacttaacagtggattttttaagaaggcattaaaaagtattgatttgattaaaatctctatactttatgtgacctgaaatgatgtgccttttacattcctttaaaaatattcttgctayctgaaaaactaaggtcgttaagtttccaatgaaaatatgtggcttgaaggaacaaagagaaaaaaatttaatgtatttgggggaaattccttttggtaaactgtgttatgaactggttataggaactggtcactaaaaaagtatcttattccaatatagtgaaagtagttttaaaaggggttttactgtaatgtgaatcagctagatatttgtgtctgttttctcctgctgtgatcctgtttcacataaaaattgttaaaaaatagcattgcactcatttagttcagtggttcagttgttcttgaatagatagtttatccaagaaatttatatccctaatatgagaaatactatcatttattttttgaactaacaaaattttttataagggttgatgttagcaaggagatagtgaaattggcattttattgcatattgagactataaattgatatgatcttcccggaaggtagtttggcattatgaatgaatctaaataaattattatatgcattaatccagtgatcattctagaaaactctttaaaggaaatgatcagaaaatagggcagaaatttatgaacagaaatgtgtactacaaatacatttttataaatggatgattggaagtgccctaaatgtcttataagaaaatacattatggtagatatatatactaaaatttatatttcagaagaatattaaaagaggaaaatgctagtggtaaaatgttaagtaacaaaaacatatattatcctcaacaaaatattatcaaaccaaattcagcaacatctaaaaagaattatacaccatgactaagtgagatttatccctggaataagcttagtttaacatctgaaaattcatcagtgaaatacaccatagtaagaataaaggacaaaaaccacaggatcatctcaacagaaacagagaaggcatttgacaaactccaacaccctttcatgataaaaatactcaacaaactaggaatagatgagaatttcctcaacctaataaagggcttctgtgaaaatctcaaggctaatttcgtattaatggtgaaaggctaggctgggtgtggtagttcatgcctgcaatcccagcgctttgggagaccaaggtgggtggattgcttgagctcaggagttcaagaccagcctgagcaacatggtgaaacttctctacaaaaaaaaagaaagaagaattagccaggtctggtggcacatgtctgtaatcccagttatttgggaggctgaggtggaaggatcacttgagtccaggagttcgaggctgcagtgagttgtaattgtgccactgcactctagcctgggcgatagagcaagaccctgtckcaaaaaaaataataaaataaaaattttwaaaaatggtgaaagacaaataatttcccccaaagatcaggcacaagataaggatgtctgctgtcagcacatctgtttaacattgtactggaggttctagccagggcagttggacaataaaaaagataaatgacatccatattggaaaggaagacataaaactgtctctattcccaaataacatgatcttgtgtatatagaaaatcctaagtccacaaccaaactattgaggctagtaaatggatttagcaaggtttcaggatataatrtcaacacacagaaatcaattgtatttctattcactagcaatgaacattccaaaaattaagaaacaattccatttacagttgcatccaaaagaataaaatactcagaaatagatttagtctgggcggggtggcttatgcctataatcctagcactttgggaggccaaggtgggaggattgcttgaggtcaggagttcaygactaacctggccaacatagcaataccccatcactattaaaagaaatttgaagtagtatgagacttatataccaaaaactacaaaacattgttgaaagatattaaagatctatataaatggaaagacatcctgagtgcatggatcagatttactattgttatgattccaccactacccacattgatctacagattgaacccaatctttatcaaaattgtagctggcttgtttttttgttttttttttttgagaaatttacaagctgatcctaaaattcatatgggagtgcaagggacccagaatagccgaaacaatcttaaaatggaaaaacaaagttccaagacacacttcccaatttcaaaacttaatatgaagctacagtagtcaagacagtgtgatattggcataatgacagacatgcagatcaatggaaccgaattaaaggcccagaagtaaagtctcacatagccaaytgattttttgacaagagcgccaagaacctttaatgggagaaagaatagtctcttcaaaaaatgatgctgtgtcaattggacatccacatacaaaataatgaaattttatccctaccacatatcatatccaaaagttaactcaaaatgggtcaaagacccaaatgtaagagctgaaactacaaaaatcttggaagaaatataggcgtacatctctgtgaccttgggctaggtgtcttaaatatgatatcaaaagcatatcaacaaacaacaaaaaaagataaattggacctcatcagaatgaaaagtttttgtgcttcaaagtgaaaagacaacatacagaattggagaaaatattttcaaattgtatatctgataagggacttgtgtctacaayatatgaagaattcaataaaaaagcaaatactccaattaaaaatagacaagatttgaaagaaagaaatttctccaaagaagataaacaaatagcaaataagcacatgaaaaagaggttcaacatcattagtcattagagaaatgcaagtcaaaaccacagtgaaatactatttcctacatactagagtggctaatatctaaaagacaagtgttggtaagaatgtggagcaattgtaaccttcatacattgctggtgggatctagaatgatacaatacagccaccttggaaaacagtttaaacagaattatcatttgacccagcagtcttactccttggtatatccccaagagatatgaaaatgtaagttcatataaaaatgtgtacatgattgttcatagcaacattattaataatagtcaaaaatggaaacaatctatatgtccatcagctgatgaataaacacaatgtatatccacacagtggaatactatttggcaataaaaagaaatgaaacactggcattaaaaattcagagattagacagggtaggaccactagaaatataaactgcattggttattttcaactctttttaatccaacagttttaaaagcagcctaggcaagattaccagaacctctgccttttattttctgttcttctctctcgctcttgcccttgtctgactcagagtcagtgggcgaggagagtactattaaaggtaaagggcttatatggtacttgaaacactcactttcctgactaccaaatgtatagaattgagaagacttgggcrttatttattctaaagatacagagaaactaaggtcatagtttcaatttgatttaaaaaggggtttaagcaattgtgtattagtaatttattactgagtaacaaattacctcaaaacttagtggcttaaaacaataaacatttgtcatctcacagtgtttgtgattaggactagagagcatcttatctgggtggttctggctcagggcctctcctgaggctcctgctatctgaaggcctgactgcggtggaggagctgcctcccaggaggctcacctacgtgcttggcaagttagtgctgtttgttgcccagaagcctcagctctttgctacatggacctttctccatgtgactgctttagtgtcttcaccttagagcacgtgatccaagagagaacaaggaggaggccacagtatcttttatgacttagtcttgtaagtcacacaccattcctcttgccagaatctgtttggtagaagctagtcacttagtagtgcccacatgatctactaaggagaaataagctccacctagtgaaggaaggggttaaagaacttgtggatatatttttaaaccactgaacaatgactgcttaagtttctaacctgatatacatttcaaataaattttgcagtgtttaactgttcttcagagactagatgtttggctttctggtgggaatgacctgtgtgtrtggaaccgaaaattagatctcctgtgtaagactagccacctttctgatacaggtaaaaaacatcaaggtaattttgaactatgattgasagactagaagacacagcagatcttcagagagactttccataagtagaaaggtcaatataggggatttttctttttcagttctgaagataacaggtagccatattcaattcagatcggggttgtgtaaaatatatttttatcctgaatcaggaggagaagactccactcargaacaaccttttccaatgctcttgggctgttttcctgaactgtgtttgrtgagcacgctgatacctagaagcagacccttacgactttacagtagcatttgtggggtcattaactttgaataaatgcctaaggatgacctctttttacaattgtccttaccaaaaagatcatacatgtgcaagcttactgataaagtttcattttctcacaattctgtgtacatacgattttggtttcaacagaaaaaaaataatcaaatcagttttgactttttgataccaaggatcttaaaaaataaaatctatttttagagtaaaatatttaaatgagtagattttaataacaaccttgaagtcacactaactattgttatttctaaaaataatcaaatgagcctgggtatcctagaaggaacattgttgtgcatgttgttgatatttcagtggtagcaggagccctgtgaattgaatttagttactaataggagctagcttagctccacgtagayattttaaagtatcagaaacataatgacttaggaaaactaaatccatacattgctagggtttacaatttaaccactcagttcaacatttgattactaatagtcttgctcaaatctagaatatatttccctgtttactattatcatgaattatgtgtctttatgttcatttttctctctctttcactagcctgtggttttcatgaattttattttggtaaagttatattgtaaaatgttgaaattggggctgaaaagaatcttctgtgtgttcctggaaatagccacctcttattgcagtctccctttgttttgcaagttatgtttaagtactatatattaaatcattacaatactgccatttatcagtgtctcaagagttaacagaaggctttgagggtatctrtgggaaagccttgagaaggccatgggttactattggtgagctgttcatcatttgggttttccaaattactggaggccagattgttaatagtgttattagatccttatgtcatgatgtcctttcataagccctgcttgatttatggactgstggagcttttacaagcagttattctgtgtttggaaataagcaaagacaatcttagtcaatgtgatacaatggaaggagccctggactaaaacacagggcatccgtgtcctttccagtaatatgttttgtgattctgagtattaggttgctacatctggattgttgggcttctagtattttcacatataatttagtgaaagatttttaaacaagctgttttctgcatttagaattcttctcttgctayccaccctgctgttctcccatgtcctctgccttctctgtaccattcctttgccttccttgcagcaccatttcctccttcttgtacatgggaaaatacaaaacctactgttaaaatatgcctatgtggagaaaaatcttggccagaaatactatccaaatcacaacagtcagtcctttgatggatgggaaggataagcaaatgactagaccgttttctacacttgcatatatattataaattacatatatatcataatggaaaaattraacaggtttttttttttttgccaacacgtggtggttctaatwtatcaactcttttattcatactgacagaagcaaaattgtaacatgccttgtagaagttatagttacgctaaaatcattaacctctttacttaaataagtgaagtgtgttagaatgttgaatctgattctttcattaatagaagaaaaattttacatgtattagtggatcacaaacatgctatttgaaggctgctttcttagctgctgactgttggctagttcattcaatgccagggagcctgctcaggcttctaaagtttacatgaaggaaaaccccaattttacatcacttttgagctagccatcttgtaaatgggtgatggtgattatcttaagggatccctggtaaataagtgtgaattgctgaatctaccactttatcacaatagtraaaaaaagtacaaaaaaacccaaccccatattctgctcttaataaatcaataatgtcttccaaaagtctcagaaacctacatttaacaatcattttccattagtaagcaagcaaggaagtgtgtgtggagctagttctgtgtgctttatcttctttatggaaaacgactgacataaaactgagaatgtttttgtttttgatataatctgtgagaaaaataatttgaactttgttttatatgtttttggaggtattagtgctttggttgaaatacctaagaactgtgttgtggcagcagttggcaaagaactgagtgagtatgaatttttttctttttgtgtrttttgaacgagaattgtatacacatgctggaaggactaaagtaattttttatttaagggacattgcgtgtgccccactcttggcttcttgggattgttgaagtgatacagagactaagacattttcaggatgttaggccaggtttctttttcttatcagtgttttaatcagtatgttagcttggttaaacagtttattgcttgttattccaaaattccagtctcaagatcacttcataatattccaactaaagtagaatttcccataagttcaatgtgtatcagaaagagttctcttttctattgactgaaaaaccttcttttgacaaccacagtttgaatatgagtagctgtcaggattaaataacctggwtagagatttgtagtttggtaaaatattgtcagagacacagaaagaagcatggcatgacctatcttctagagagaaatgtgagaaagaaaagatamtttcgtaatttgaaaaggacatgatctcagagacttgtcacttctcagatgttagtgatrctaatctttgagcatccacagcacctggtccagtggygtatttttaaaacactcagtacattgacggtaagcctgtttataaacaagtctctctcccactctagactgagcatttgtgactgggccttattcacatttggtacgtagagttcctggaacataaatgtttagtaaatgatgatagaatcacgtctgtggattttattatgggttttctgtattgattaaagttaggatttatactagtttaaataaaactgtatttgttaaagtcagataatgagtaaagcaacacattgaacattactatagtcagaagaactgtatgatatataaacattataagacatactcagagaatttataatttaatggtatatgcctaggaatcagaagctttttaaaaaagaagttgcttatgtcttcactgagttgaagttaaacttggatttgcagcttattctgtmgcaatgcttacatgagtaagagacatgagtagagaaagctgatgttggaggtgattgagggatgtgggctagtcactgattagggagggagtgagttgagataacaagacatccgttgaaaccctagagagaatgggagcttcactgtttggaaaagtcagtaaaggaagagagttcttcaggacacattcagtatgggttttagtagatcatctcaaacatctcaagcatttgaaagaaatagtttaaagtagtatgaataaggcttttttttggagatggstttttcagtatggtaggtatttttcacttaatgaaatgcttgtttttagagcaggagtagtattttatcctcttagagcattgtaataaaattttatctgtctttttcatttagtaattttcaggttggtagcacccacagaaggatcactagaatgggatattcttgaagttaagcgcctccttgatcaccaggataatattctctcattgattaatgtcaatggtaagctcattgtgtacatttattatgtacagttttgtgcttgttaacacaacctgctctgaacacgagccttgcttagttctgggattctagaataagtcactaaaataatgggattgtcattctcttttactctgaagttttagccggtggagctgagcaagtttcctagattgctaggtctaagatttagggacaaggaaaatagtgtaaggcagagaaaatagaggagaacataatgatctcaggcactgcttggtagctgtgggatgactgtcacaggctgtttcagcatttttggcagctgtttctggctagttcctcttttgtagagagattggaaatatgcccttttgtcttgctgtccacaccatacaatatcacatagcaagttacacacttacactagaatgagcaggattcaagccagttgtaatcctggttgaagactctcaaagaataataccaaactaaagtaaaagtctgcagaaaatgggtcatgtcttcccttccttcctcgtggtgggggttttgacctgctgtacatcctatttggcttcctaaatgattttaatgagtatctcctgtgagctaaatctgacatcagatggcaagatcacaaaccactgatcttgacattcagttcacttgcagataagtgacagcttatatcatcagaactgtgctgggtgatctgtgtatgaagtcacatgagagggcttttggtggcttcagtttgatagtctggtggagcctgcaggacgatcctgtaaggctgcttgggagtatgatgtagtgggagggctagacagcaccccagcaacatatctccctgaggcctggcttggctttgttttttttgtttgtgtttgtttgtttgtttgtttgttttgagatggagtctccctgtgttgcccaggctggagttcagtggcatggtctcgactcactgcaacctctgccccccgggttcaagcgattcttctgcctcagcctcccaaatagctggaactacaggcgcatatcaccatgcccagctaatttttgtatttttagtagagacggggtttctccrtattggccaggctggtctcgaactcctgacctcatgatccacctgcctcagcctcccacagtgctgagattacaggcatgagccaccaagcccggccggctttgtttttaagcagtattttgcgtgaatgtgagacaaaggggagcgagggacacagagagtaccaagtctagtctccatttgtgtccattcagtcacatgttcagatacaccagtaagagtgtccctcccagctccaaaatcttcctcccaaatagccatcttattgtaaaactcagctgcaggtctttctaaggactagattgtctgtgttgatagaaataacaatggttgctggtgtccctttaattttctctgggggctctttttctctagccatggatggagacagcacagaaggcaagttcttatttgggaagccctctgaagcctcattggtgacactgagtcttaagtctcaagttcccagggctgctgagaaaagcccagcagtattcggcccattacaccggtcatgcttagttattttgttttagcagtgaagcactggcaccactgagccagcatggttacttaaatgaagatgataggatgatacaagatagcctgaacttcatggcatgtcttttaccatgtgatatgcagaggaacttacagcagtttctgaaagctttcttcgagtattcatttgccaaattcgtaaggggaaaaaagggaaaactaaagaaaaaagttgtttatgaaagttacagaaagcctcatgcactttttactgttttttactatctttttaaaaaatttcttctaaaaaaatgggatacatgtgcagaatgtgcaggtttgttacataggtatacgtgtgccatgatggtttgctgcacctatcaacctgtcctctcagtttcctccccttccccacaacaggtgctggtgtgtgttgttcccctctctgtgtccatatgttctcattgttcrgtttccagttagagtgagaatatgcggcatttgattttctgttcctgtgttagwttgctgagaatgatggcttccagcttcatgactatgtccctgcaaaggacatgatctcattcctttttatggctgcatagtattccatggtgtatatgtgccacattttctttatccaatctatcrttgatgggcatttggattggttccatatctttgttcttgtaaatagtgatgtagtaaacatacatgtgcatgtgtctttgtagtagaatgattgatatcctttgggtgtattcccaaagtaatgggattgctgggtcaaatggtatttctggttctagatccttgaggaatcgccatactgtcttccacaatggttgaactaatttacactcccaccaacagtgtaaaaatgttcttcccattctccacagccttgtcagcatctatggtttcctgactttttaataattgccattctgactggtgtgagatggtatctcattgtgattctgatttgcatttctctaatgatcagtgatgttgagctttttttcrtatgttttttggccacataaatgtcttgagaagtgcctgttcatattttgcccactttttgatggggttgtttttttcttgtaaatttaagttccttgtaaattctggatattagaccgacctttgtcagatgggtagattgcaaaaattttctcccattttgtaggttgccttttcactctgatggtagtttcttttgctgtgcagaagctcttyagtttcattagwtcccatttgtcagctttggcttttgttgcagttgcttttggcatctttgtcatgaagtctttgcccatgcctgtgttctgaatggtattgcctaggttttcttctagggtttttatggttttaggtcttattaagtctttaattcatcttgagttaatttttgtataaggtgtaaggaaggggtccagtgtctgttttctgcatatggctagccagttttcttagcaccatttactgaataggagatcctttccccattgcttgtttttgtcaggtttgttgaagatcagatggctgtagatgtgtggtgttatttctgaggtgtctattctgctccattggtctatatgtctgttttggtaccaattccatgttgttttggttactgtagccttgtaatatagtttgcagtcaggtaatgtgatgtctccagctttgttctttttgcttaggattgtcttggctatacggggtcttctttgattctatatgaaatttaaaatagttttttttctaattctttgaaggatgtcaatagtagtttgatgggaatagcattgaatctgtaaattactttaggcaatatggccattttcatgatattgattcttcctatctatgaggatgaaatgtttttccatttatatgtgtcctcccatttccttgagcagtggtttgtagttctctttgaagaggtccttcacatcccttgttagctgtattcctaggtactttattctctttgtagcgattgtgaatgggagttcattcatgattttgctctctgcttgtctattgttggtgtaaaggaattcttgtgatttttgtacattgactttgtatcctgagactttattgaagttgcttatcagtttaaggagttttttgggctgagatgatggggttttctaaatatacaatcatgtcatctgcaaacagagacaatttgacttcctctcttcctatttgaataccctttatttctttctctttcctgattgccctggacagaacttccaacactatgttgaataggagtggtgagagagggcatccttgttctgtaccaggtttcaaagggaatgcttccagcttttgcccattcatatgatattggctgtgggtttcttataaatagctcttattattttgagatatgttctatcaatacctagtttattgagaatttttaatatgaaaggatgttaaattttatcraaggccttttctgcatctattaagataatcatgtggtttttgtcattggttctgtttgtgtgatggattacgtttattgatttgcatatgttgaatcagccttgcatcccagggatgaagcccacttgatcatggtggataagctttttgatgtgctgctggatttggtttgccagtattttattgaggattttcgcatcgatgttcataagggatattggcctgaagttttcttttttttgttgtgtctcttcctggttttggtgtcaggatgatgctggcttcataaaatgaattaggaagtccctctttcagttgttcggaatagtttcacaaggaatggtaccagctcctctttgtacctctggtagaattcagctgtgaatccatctggtcctgggctttttttggttggtaggctattaattactgcctcaatttcagaacttgttattggtctattcagggattcgacttcttactggtttagtcttgggagggtgtatgtgtccaggaatttattcatttcttctagattttctagtttgtgtagaggtgtttatagtattatctgatggtagtttgtatttctgtgggatcagtggtgctgtcccctttatcatcttttattgtgtctatttgattcttctctgttttcgtctttataagtctagctagtggtctattttaattttttcaaaaaaccagcttctggattcattgatttttttggagagtttttcttgtctctgtctccttcaattcttctctgatcttagttatttcttgtcttcttctagcttttggattagtactttttactttataaactctatgactataaaattatactacagataataaataagccaaaggcgtatttaggaatcaaacatgaccaagtagtctgttaaaatttgaaaatgatytgctgacagtctcatcttgcagtacataggcacgttagccatgatgtggatgtcagtgatcctgaaatgtttatgttgtacagttccctgcttcacttgcaggagctctgctcctttctcctcacccattaccaatgaaagatatggccagttgcttgggattgtacatcacagggcaaatctgtttkcagaggggtggccccagggcaaccttagaattgtatgagagaataccaacaagtgtggataatgaataccagatttgctaaaaagattggaatgcccaggcagaaggttttctaagacagacaaaaaataactgataatctctccaggcagaaggctctgggtgctcctttattttattccttttcttgtattatgttgccagcatcttttggtaatcatgaagtactagtacttgtgagggatggatagacagataccaggtgagattttcatactaagtggcttttgacacaggatgaaaatccatccactaataatatataattgaggttgtttgtcatgaaacattttgaatgacctgtttgggaattagtttgccatgtgtaaactgcttaaaaatatgtgctgattggccaggtgcagtgactcacgcctgtaatcccagcactttgggagcttgaggtgggtggatcacctgaggtcaggagtttgagaccagcctggccaacatggcgaaacccgtcactactaaaaatacaaaaattagccaggtgtggtgtcacatgcctgtagtcccagctacacaggaggctgagacaggaattgcttgaacttgggaggtggaggttacagggagccaagattgtgttactgtactccagcctgggtgacagagtgagacttcatttcaaaaaaaaaaaaaaaaaaaaaagtgctgattgagctgaatgccgtattttatttttagggaaaattccaactggtcattaatattttgtttctactgcatggaggtatcacagacacttggaggattaagtcagagcaagcagctgcatggtctcagtaggttaattctgtgttgtgactacagatgcagagtgagagtcaaggggaatcttcactccttagcttctctggttcttttgtagtttgaatgaaataggaaaaaggagggaaaggtgtgggaaagaaggtcctgggaagatgagtactgccttaactttcccactactaaaactagaagcccgttttgctccacagatgagaagtgatttctccacagagcaagttctatagagtctgttaataaactatagaaattagatattaataatctacctattatggccttggagtcaagacaaataatatttacatgtaggattgctggtaattctgtatctcttaagagattgttcatgtggtcattagagatttctgtcgtgctggtttatttgataaatgaaataattaaatcataattactcatctgtatattcctaaattaacaagtaacaggatgttttaatacgattaatgtggaataataccaggggctcaaaatactaccaggggcgcaaagataatatttgatgtctttttaaaatggctacacgtttattattcaatttgatttttagtcactcatttaatgcatgargaatccaagataaaggttaaactacttcctaaagaccacctgkctagcaacaggcagagccaaaatcagaacttgggtttctagactaagtgcattatastcttctgtcttaccctaaatatgtaataatttaaataaattacatttatttgaaataagactagcagttgtacattttctattaaatatatagtgtgtaaaataaataatatgtaaaatggaaaaaaatcctttttttttttttttttttttttttttttttggggagacagagtctcgctctgtcgcccaggctggagggcagtggcgcgatctcggcttactgcaagctccgcctcccgggttcacgtcattctcctgcctcagcctcccgagtagctgggactacaggcgcccaccaccacgcccacctaattttttgtatttttagtggagacagggtttcaccgttttagccaggatggtctcgatctccagacctcgtgatccacctgcctcggcctcccaaagtgctgggattacaggtgtgagccaccgcacccggctttttttaaaggttttaaaaacttgtaaaagttatacatagtcatagtagaaaaatatgaaaatagtgaaaaacattaaaaatataaaagttaatattaaaatctttccactatccagtattaaacaccagtccacatctttctaggtgattttctgggcctatgtrtgtgtgtacatgtgtattaatayggtttactgttttgtaacaatatgtcataaatatatttccatatctaagtttatattgttaagcatacttttataacttaatttttaataacagcattactatttcattttgttgatgtcttattcaattctcaattcgatgtgtagttatcttcagatttttaagattgtgtatttgtacatatatgtatgtaacaaccttgtacatttatgtatttccttcaggataaattcctagaagtggaattgktggatcgagatttacatttttcaaggttttgatacatattrgcaaattaatctttgaaaaaaatacyaatgtatagtagggcattaggcaatacaggaatgtgctgatttcttatgcttttgccagtactgtgttgggtattttcctgttttatatttcctgattcacaagtcaataaatggtatctccttgtttttagatttctttgattattaaaggagttgaacatcttttcacgtttactgaccatttgtatttgttttgccttttcaggtccttttcccatttttttttctgctgtatttatcttgttcttaataatttccaagaactccttatgtatcaagtataataaacctgttttgtcatccaagttgcaaatttttcccagctttttgtcatttcagtgtatttgtgtgtgtgtgtgtgtgttttagactgagtctcgctctattgcccaggctggagtgcagtggcgcgatctcagctcactgcgacctctgcgtcccaggttcaagcagttctcctgtctcaacctcccaagtagctgggactaaggtgcacaccaccatgcccggctaatttttgtatttttagtagagatggggtttcaccatattggtcaggctggtctcgaactcctgacctcaggtgatccacctgcctcggcttcccaaagtgctgggattacctcgcccggtccttgtttttgttttgccaagcagctacttactaggatctcttcccctggcaccccactctgcttccgttagagccctttaccactccacattcctaaaagtatncacctttatcttcttccatcctttaactaactttcatgttttaatctatttgaaacttattttggtgtatggtacaagataaggttcttttacttttattccccttaaatgtaaccagatattccagcatgagatttctttactgaaatgaaatgcaatcattattacatactaaattactaagataatttgagtctatttctggccttcttattctgttacattaatctttctgttggcttgcctaggtacctcactgttctaattactgtggttttatasggcattactactagacattccawtcagttatatctttacatagataaaatgatcgataatgaggcatatgtgaactttgcctagatttgagttttgtcaccggctcccacgtcggagagctgatcatctgggatgccctggactggaccatgcaggcctatgaacgcaacttctgggacccatctccacaactggacacccaacaagaaataaaactctgtcaaaaatcaaatgacatttctattcatcatttcacatgtgatgaagaggtaaaaaatgtatacaytatctataaacttgcctttgacatatataacccaatttctgattttaaaaatttaatcccatgttggacataaaaaaggtatcattcatggtttcaggttgtgctttaaaatggtctttttctaaaattggatgatttgtgttaagcattttaatctttgcttctaatctcgaggcaaggaaatgattaaatggccacagatttaaaaattattgaaattttgggttggattaaataatcccattggatttgaggttaatgcttaaaattgttttaagaaacactgtgaaaaagagttcttttgaagatctgacacatttcctagtgaggcaaagaaaattaaaaattttaggagtgtttctcagtctgctggcatctkggggcaagataaattgagtgagaattgttggattccatcttataggacttgggagtgatgctcttgaagcactttagatctgttttgctgtgagagattagtaccaatggactactgaatcttatctctgatctgaaaaaacaaatctcttagcatcaggggctcagaaaatgtttttaaagggcaattaacttttctaaatgtaatcacaagaaatgtttatgarttgtacccttcgaggagaaggagttggggaggcttttctctattttgtgactttctatactgtttaatttttctaacggcatgcacgttatttttattaaaaatttcagtagtagtgttatgtagtggggggagaatatgatccatttttctttgtaccactctttaaaaacaaaacaaaagattaggataggaacaggacttagaaacactaatayattcaaagattgtttctttgtatcccaactttattttgaaaaaagttaaatatacatgataaagacagtatggtttcagaaaagatagagactagatcactaagagttgtagccctacaaattatctattttaaatgttacatgttttttctcacttttgtgaaaattaatatttaaaagttttgtattttaatcttaaattttttaattgatgtttattttctactatatatgcttgataaagcattgtatagttttccctaatttttcttcttttgttgtgagttctttccttctataagggaccgttagttattgatagcggggatagcatccccattgagtaaatgctgcctccaaagctcatgaattctctagttgtgtttataattttcttcctgaccttggataaattacttaaactgtgcccagatttcctggtctatagaatgagtttcgggggattttggcattgaatacaatccacagggctttccattttagtacattggctagcagtgttcattaatgccctggcattgggcctcggctgcattgctgattgcagagtactaatcctgagagtcaaggggatcattcmagatttaagattccagcaagccttgggggcatgctttggttcagttactataggtctgagttgagtttgtagtcttggaggctgtgtgagaaaggttggagagcccagaatctctggtgaaaacaagaaggcaatatgtagggatatttgaaaggtctgcctcatggggatatctattgagtaagaatggatgattctaggacaggtgcttgcaaaaatttcaaaggctactactgcatgtgagtcacgtgaggaatgagcaagggactggagtaacatgaccttgattstaatattgactccatgtttcatttcttgtgtgactttaatctctttaattttaaattccttatctggaaaatggcaatgatgcttgcctttcttaacacgatgttgtgaggctgaagtgagataagtattagtgaaaatgctttcaaaagattaaagttgttttagtaaaaaggtatttatttctaatagtacatttggaaaaatgttttttgaaaccttcagaggattgcatgatgataatgccactgtagccgtgcttttttgtatcacttgtaggtctcctgattgcttaagatgtggaatgcaagtaattttgcttgcatttttcaggcagaagaagctaggtaattttcccaaggatayagtgttatttaaatgaaaactcaggttatccctcaacagcttccactgcagggccaggctgctagctatagcttttctctagatatatttcagtgaggaagaagtggcgctaagggatatactatgcagacctacctttctctgcattagtggttgtgtcctaccttctaaatgctcagagctttctttagtgctttgacattttggggtttcagagattagtactgtaatttgggctaaaggctaggaatgggaaaggtaatggtgkctttctgatgtcacaygagggctggaaatccattacactaggaagggtgagtgytagttttatgcccatttctgaacttcttcccctagaatgtatttgctgcagttggaaggggtttatacgtgtatagccttcaaatgaagcgtgtgattgcctgccagaaaactgcacatgactccaatgtcctgcacrttgccagacttccaaacaggtacaagttcccatctgttctgcaatagatgaaagcaagtcacagttcccagggctaccagtgtaatttctcaagtggccaagttacctggcttcatggcttgacctgctgtgttcttttggaaatggagaatgcctgagggctgtctctaacagaagggtatgtggcagtatattacagaatttacaagaagcaaggtgcaaatgaattacattgaatttcattgttaagaagagatgatttaaaatttggtatttaacaacataaacgactttggggccacttacattgtaccaatttttatatttctcataaacctaccttctttttgtttatggccagaatcaaatggttgctggtctccttgttgtgtgaggctactaagtgagtggtttcctgtcagggtagatttgctgctgagcttctagggacgaacatatggacagggactatcattattttctatgcaggatatttttatagtgaagcacccagagaagagaggkagcaagaggagggaagggggctgcttaggacattgtgaagtataattcacactgttttcccaagggcatttttttaaatggagagaatcaatttatagcatttgagctaatgtaacgagtaacatgtggctttcctaaagggtgcttttagtttgcgttgtaacgtcatgctaaattgtratttttgtcagttcctgctaagagctgaataaaagcagttgagggctccactgatttctttcactgcaaatttagcattggccctcagtggtgcgctctttttgtattactgattttctgttctgacaggcagttaatctcatgctcagaagatggcagtgtacrcatttgggagttaagagaaaaacagcagcttgcagctgagcctgtaccaacaggtgtgtgtcttctctcaaaaaggtagtctttttctctccttttttctcacgtgaaaggcaggagaaggacaattatgtgaaaccactaaaataatatagaaatgctccaaataggcatcagatgtttatagaaagcatatggtaattgagatctaggatttacagcttaatactgccctaatgtagaactgccacttcatttcaagtaagatagagattttcttgttttgagggaaaacttactttctggtaatctgaatgaccaratggcctaatgaagtattcatttatattgtctataattctgactgatacacaaaatttgtaccgtcagatgtcaaaccaaagtgttctttacccttgatgttgaacttaatttatgggaaaacatacttttccttgtgtgcttatatcataattttatgagctcttgacttccaggtgtttagtttgaaaaacaaaactctgaagggttgaataaattagttaccaacctttgcacaagaaatcagatgctggtacctagttgtttctggtccttttgacttcctgaagtcctggggtgttgcttttgcacatacatatacagcttttcccctatgccttgtttgttgatctgagttttgcccttttttcccttgacagttagacactgccattcaagctttgtttctgtcctgttttattccaagtgtctttttgttaatatacctgcaccagtgggtgactaggggcaataaaaagagatgaagaacagacctggttagctaagaaagatgaaataacatattcacaaaaccctagcacggtgctcaggtactgtccacttagcccttgactaaaataagtctggaacctcttcacatttaaattttgtttttctgatctcatgttattgtaagtacagagcacartaaktttggaaatgattctttttctaggtttttttaacatgtggggatttggaagagtcagcaaacaagccagccaacctgttaaaaagcagcaagaaaatgctacttcatgttcactggagcttattggagatttgattggacactcatcatctgtggaggtattgctgtttagccacagaatgtccaagcaactcctgcttttgcatttcattgctcttttctttcagttgatctcataaaggcatatactttttcttatatctgtaggtgtttgtcagatctgaacatggaatgggataggctatagtatgtgcagttagggtctccctttccggatatatgatttgaggaaacaaggaatgcattgcttttaagaatggtcttaatcaccattatttaggagctggagatagctgacagtaagggcagtgtgaataatgttgactatatgacaacagtmaacagaggatgcatgaagggttgtggttatatgtgtatacagttaaagccttaacagaatcgaattccaggggcctttatcaaattcatgaacagagtcctgtttctcctgcctttgaaggataatagtttgttagctttaatgaaacctatgccttgattttcattgtgcaaatatgaaagttttagttgaaaattatgaaatgcgtaagcttttaacatgtagaaatccagatacattaatatttgctgcaggcatcattgcctgtagtgaaggaataagatcagtkgaggtaacagattagctgtgagaactaataacagtgtaatcagggccctaaggaatttcttaaattgttcttccctgtttcatagccaaagaacaaaaaatttcttttcatttgaaagggcattcatgcttaggaggagcagcggcagcatccttgttagtgagcatttcctgtatttcaggcactgtgctaaacactggctgctggagtttacagagagagatgaawacagtccttgccctcatggatcttacccttgagtggagagaaggggtatagacctaataggctgttaccctaggctgcatttgatggacccaagtaagcagcagtgactcagaagaaacatttcttgctgaatcttgtaaatggttagaggatataggacttgacacttgagctgaaccttgaagtttagtaggatgagtatatagccttgtcatcataagctccttgatgttggggtacagtgtcatagttatctttgctttcctctaacaagtagctcagtttttaactttgtgtttatggttgggaggtgagcatggactgtggtagrcagaagggcaaagatagcatttacgtggtggcaaggagcaccttgsctaggcyggagcgctgggttcctgtgaacagacactagtaggggataaagcctgggaacgtggtttggggtcagattatggatgtccttgaatgtaaggctgaggagtttggactttattttttaaatagtaggaactcattaaaaaggtttttagatggtagggaaaaccccatgtaaaagacattcaaaatgtgtttgaatgtggcacatttctcattctataaaacagtgtcagcttcttaggaattttcctgagtgaaagtgttgagacctgaacacttttaaaaagcatctccagcttcgttgataaaatctaggctrtctttgcagtgtcacctgaatttcctcatttctttttttttctttgagacagcatctcactctgttgcccaggctggagtgcagtcttgggtcactgtactctccgcctcccaggtttaagcaattctcctgcctcagtctcccaagtagctgggattacaggtgcccgccaccacgcccagctaatttttgtacttttagtagagatggggtgtcaccatgttggccaggctggtcctcatttctattttcatccttgctctactggcgcaacccctctacctgtgtactgaattttgtgttttccagtttccgaaggaattctgctcccatgtttcctcccttcactcctgcatcctcagctgagtcttatcctgtggtcttcagaaatgtatatgtcatttcagagaaaactcttgttttttttcccgagagggagttttgctcttgttgcccaggytggagtacaatggcgcaatctccactcactgcaacctctacctcctgggttcaagcgattctctttcctcggcctcccgagtagctgggattacagatacccagctaatttttagtatagacagggtttcaccatgtttggccaggctggccttaaactcctgacctcaggcagtccacccacctcagcctcccgaagtgctgagattacaggtgtgagccaccacgcccggccctgtttctcttttatttcaccctttccttcgaggacctcatccttttcattgattcacttttctgatacaactcttcaccccatagtattcatgctgccttttgtcaacactctgttttcctattcttagcttccagcctattccttcactgggcaagycccttccccttacttggggcattttctccctttgaagctttttctgaatttctgtgacatgtcrtagtctatactgcattatttagtacctgattacataatctctcattggtacctttattgtttcaattatgatttgcttttcagaatcttcttgagggtagggaccataaacstagtgctgacacttaayacctatggattgagtatatctacttttatagagagctgaagccagtgtttatcttgggaaatttagaattcagacattttttccatagccattatacagtataagtaatggytaagtaaaaccaatacttgaaaaatcagatkatgaaaaaatctggaagaactatgagaattcatgtactttacaaaaatagctattctgtagttgaacaatattaacaaaattctgattaaaatattagatattatttgtatgtgacttaccaatactgaaaaatgaaatgaagttctacacccagatccaaaggagtctttaaggcacatatctsasacgcacatgtgttaatgtggtattagacacttctctgcttttcggggtccctataatcagttttaattttctttacagatgtttctatactttgaagatcatggactagtgacgtgctccgctgatcatctcattattttgtggaaaaatggagagcgagaatytggattgcgcagtttaagattatttcaaaaattagaggagaatggtgacttataccttgctgtctagtttaaggaattaaaaatacacatgcatgaaccttgaacatcaaatatcgggtactactctgaaaaccattaatatattgatcacttaaattggtaattttttttgtcagtccataaaattctrcatgtttaaattttttgtggacctaccaaccaggaacatgttgcttctcaggtcctagtatatcctccaaagaatataccacaagtttttccatttgactttgagctgctgttgaagtggtgagtgctgtgttttgagcttattttgaacctagatccttgtgaaaggtacaaatagaggtaatagttaagttatggcatttattagaagttttattatttggcttcctttagaattattgtgaagtttaaaaatagcctttctcctgcaaattttcctagtctttagtaactgttagtgttctatatagcacaaacttgaatctctcagccaaaaaagggaacatatatactgtttaagtatggcaagttttctttggtaccaatttgtttagataattktaaaaatgttttttagttctagctactaaaacctgtatgaactcaaatggataggcatcttgtgagggtgtgtttttcccagtgtgaattggcttgaagagccatgggctaaatgggtactagaacaacaactgcccctcatgtacgccaaggatgagctctagatcatttgagaggcacagtgtttccggagtcagggactgcagctgagcgcaactgccccatctgaccactgactcaaatacgaactgcttgagacagacttcttttatgtagttctttgcagtgtccattgagacactataaccagccttgtaacaatatgttttctccttttggtgctaaaaaatraaaatattagaaagtagtctacacattaaagattgaaattcttaamctactgatgaagaaagggcaacgtgacwgatgttagcagactgacccttcttacagaaaacctacagatttatttgttcattatacaaatatactacaaatataccctaaagggaatctccataagttcttttactagttttagctttgacagttgcttccacaactacctacaaagactggaagagttaaggtcatctgagtagaccagtggcataatgttacaaatgaggaaactgaggcccagtgcagtaaggccttgcaattaaatctgtagtgcccagtatcaccaagcagctctaaaaacaggaactgaagactgaatgagaaaggcttatatgactactttaaatccaaacaacattgagtcatgaaaagttctatggagaaatattaaaacttaagctacctcaattacagaagactttctcccattattcacgtgctttttcctttagaaattctgcattggcccatacatttgtaaagttgttttctgaagttgtatgacacaagggagccatagacttaactgttttacttcctagcctgttctaggctagtattttgtgatagtaatctattcaaatggagtggtagaaatcacatgaattttggaagcaaatggtaccgtaagtaccacagcaaattccttctggtcattatacaggcgtacctcagagatactacaggttaggtttcagaccacatcaaaaaagcaactattgcaaatagagtgagtcacatctagtttttggtttcccagtgcctataaaacttgtgtttatactacagtcttaaatttctaaaaaatgtacataccttaagaatactttattgctaaaaaatgctaacaatcatctgagccttcagcgagtcataatctttttgctggtggagggtcttgatactgctggctgttgactaaggtggttactgaaggttggggtggctgtggcagttccttaaaataagatagcgatgaagttttccaaatcaattgacttcctttcacaaatgagatctctgtaacaygtaatactatttaatagcattttacccacagtagaacttctttcaaaatttagagtctgtcatctcaaatcctgatgctcctttatgaactaagtttatagaatattctaaatcctttgttgtcatttcaactatgttkacagcatcttcactgtggaaatgactgtctccagaaaccactttctatacacattcttaagcaacttctcatctattaaagtttgatcatgagattacagcaattcattcacatcttcaggctccacttcttccagactccttttaatgctggaattttgaccgcctcccatgaatcagaatgttcttagtggcatctagaatgctaaatgcttcccagaaggttttcaattgactttgcccagactcttcagaggaatcactagttagggcagctacagccttattaaatgtatttcttaaataaataagacttaaaagtcaaagtgactccttgacccatggactgcagcatagatgttgtggtagctggcacgaagacaacatgaacctccttgtacatctccatcagaactcttaggtgaccaggtaacattgtaatgggcagtaatatttggaaagaaatttgagcaggtctcaaccataggcttaaatattcaataaaccatgctataaacagatatgctgtcatctaggctttgttattccacttctagagcataggcagagtagatttaacataattcttaagggccttaagatttttggactggtaaataaactctgacttcaacttaaaggcaccaactacactcgctggcaytgaacttcttctccccagctatgaagtcctagatgacatctcttctaatagaagaccatttcatcttcacaaactcagttgtttagtgtagtcgccttcagtgatcttagctagatcatctggacaacttcctgctgttgttgtcccttgcactctgacgttaatggggatagtttcatgaaccaacctctgcttgcttccagcttttcttctgtagcatcctcacctctcagtcttcraagaaagaattgaagaattaattaggctttggcttaagggaatgttgtggcttgtttaatctatatagaccactcagactttctccatctcagcagtaaggctgtttcactttcttgtttgcatgttcactggagttaacactttcaagaactcttcctttgcataacttggctaactggtgtaagaggcatggctttcacctgcctgggctttcaacatgccttcttcactaagctttattatctgtagcttttgatttaaagtgagagacatgtgactcttttacttgcacatttacaggctactgtaggttattaattggcttaatttcgatattgttgtgtctcagggaatagggaggtctaagaagagggagagaytggaaaccgctagttggtggaacagttagaatatacacaagatttatcaattaagttcactgtcttatacgggcatggtttgcagtaccctaaaacaattacagtagtaacaaagatcactgatcacagaccaccatgacagatacaagaataaaaacatttgaaatactctactctagagttaccaaaatgtgacacttacacaaagtgagcccatgctgggaaaatgccccgatagacttgctctatgcagggtggccacaagccctcaatttgtagaaaaggcagtatctttgaagcacaatgaagcagaatgcaataaaatgaggtatacttgtattctaattttctgccatgaaaaactgtctagagggcagtctccaaccctagggactagattgcttttgttttcatgcatgccctaaggtcacagagatgggggataacagtatgatgggagattctggtagggactcaaacctgatggtgttcagtagttgcaggtagactgctgctaaaagttggactttcaatttagaataaaataatgggtcaatgtatattatgtacattttctccatttcctgagtttagctttcaacagttaagatacttgcaacagcagaagtaacactacatagtgttacagtgtacaaatcccttgtcatttttattttaaaatatatttattacctcagtctctggctatattcacatagcgcaagggcacaagatcatcccttctgtttctctctctaaagctgagtaggttctgagtgaactgacaggcttgttttttttttgcccagaatgctaaccagtcctgacatggagggcaagtaaatttaaaaatcttaaattagaaataaagaatgatcttaggaaattatagggtcattctggtccagcagtgttttataactggcttccttctcttactagtcacggaaattattagagagtgttgcattttcctaatacggcccycctcagcacatgacatttaagtaaacaactctgtgtaagaggcagttataatagtttatataatataaactatctgatacacatatcatctgaaagcctgtatttctaacaagttgactatgtggaagaatagactagttcgcaggccagaagattataccgtagattacactggtaaagagcagaaattgttgacgctttagtacctagctgtcttaaagcatttttaaacatttgcacattactaataaaaagtttgaagttaacaagaaatttgacataaaactgagtaagctgtaaatatttcatatagaagatgtctgacacctgataaatgttacttaccaaatagaactgaaagtgagatgatcagaaaaagattgtccttgcctcaagcaagcttctgaagcctaggcaagttagctaggtccttaatatgggattctggcatcctgattttaatgtgctctgaaaacaaagtgtgtgactcatgaaataaaggacactaaaccccaaatttgaaattatgaaaactttaggccaaagaggtaaaataaaaacagctgttgggagtgaaaaatggctgtaggaatttagttacaagtacttcacaaaaacattttcatcacwtttacataatatagcattacaatacaaagctggctgctgtcctgaccaagcaagttctcttatcatctaacaaaaataatttagatacatttctttgcatggaattgtcatatttttccatttttggtacaaaacatagaaaaaaacattggcacattatgtagtgataagtcattttttccccatgtacaagttccaagtattctgcattccaatttgtattggaaaaaagtaattactgattcaattaattcagtctctgtttgtttataccttttaaaaatgcagcatgaagtacagagaaagaaaaatgaagtttgtttacggagtctaatatttataatacataggaaggatcagctggtaaaagagaaaggaaaatctcgagtctgactttatgtagatcacagggagttgtgaaaagagcagtataaaaatatgcacttgtgctttagaagcttttagcatacaattaatagcttaaaatagtatttactgcctccccatatgcctattttctgatatatttacaccacacaattttaacattgttaaagctaatggcatgatttcaaatatagactggttaaaaatatctgaaccttgaaacttcccctatcccctcccaaaatattacgtatagatggtgcatggcacaacatactgcatgggcttacacccagaaaatttggattttaataaaaattttaaacatgtatataaactttttttttttttttaagaaaagcttgtccaagggcattcaaatttaatggcttttatataatacttggtgtagtgcctcgtggctgcctctgtgagccagaaataaaggaagctcatggattccccaaaaatgaaatgccactttttccctcatcatggatgactttgttaagatgaaccccttttacaggaaaggggttacacaggctgctgataccagtctagagagggcacccaccagccaaggctgtgttctaacttaggtgtcataccatcggccagaagaaccatgtagccatagaggctgtgaagctaactagtttatctgtaatttggtcctagttgyttcrcttattttatgtckttttttttttttcttagataaatctgttcagataagctccttatgaatccttcagatcgaygttcttgaggaaaacagtcaagctaaacagcaatgatgacttttatggtaaaggatgagctgatcactagctaagctacttagtcaccatcctgggagatgagctcacaggcaccaaggctttgcttcctgtggcctgctagttacagtgaaccagctccatggattgacaagggtacacaggatgacagcagagcaaaggagtttgccaagtatttgttctgtcattaagtattcaaaagaacatatatttttcttcatggaacataactttctaagaatgaaatttggggacttgaatgattcaaggtcaaatattaaacattagctccttcaccaatacctgtcattgtcattagaaaggaaggcctctnrtttacgctactgtgattcacagtgtcctttgtcggtcaagaggccccctctgtggcttggctttagctgtcagatggaagcctcaaacttttgcacttyaggtcatctagtgtcttccagtgtttgtagttgtcagccaaatgttgcatcagggctggcagatgtgcaaaggctgcaaagacagaaaagaatcaaaagaaacyggtgaacttagaccccaggagcatttataagcctgggggtgtctgggacaagtttgggatcagaattagaggaggcacaccctgggcgaagcatgaggacaagtcattaaacactagtttctgaaatgcaaacaggtcctttttgaaaagctgcttatcagtgacattatcagaagaacctgtgattcagagtaaactaaatacattttgcattctttctagagttttcctccaacgacagaaaaacactgcagtaagctttggcagcgtgtcctttgaagaggcagagactcgtttatcyagctatcaaaaatccatcaagtcttctgcacacaagcttctgtgccagctgctggggatgcaaagaatgcaccccaccccacttggccacaaaaagctgacagccacatttttaaaaatatattttgtttacctttaggctcaccctgtgtcactaaagataatattcgtaaagtataacaatyttctttgggtgacaaaacagtaactgtcttaccatcccaagcatcaaacatgtctgttatgaagtagtcaatgaaagagatctgagacttggggatgctacaggtattccggtcaaacactggcatcaccacaggtagtccctgtctcttctcttcatcagtctgtaagaaaaaaccaccacatagggctggaggacatgcgagacactttcacagtaatatcctgtttctcagaacaaccctgtgaaaatgggtcattatccagttttctcaatgaagaaataggctcagcaaggtcctcagacttacgtaagtcagctgagctacactgactacactcagaccttcccactctcaagcctctttttttgtttttgagacagtgtctcactctgttgcccaagctgtagtacagtggtgcagtctcggttcactgcaacctccgcctcccaggttcaagcaattcttctgcctcagcctcctgagtagctgggaatacaggcacctgtcaccacgtccagctaatttttagtagagaaggggtttcaccatattggccaagccagtcttgaactcctgacctcagatgatctgcctcccttggcctcccaaagtgctgggattataggcacgagccactgtgcctggccccaagcctctttctatgtgataccatagcatctcctgacacattgatctcagggtacttagccccttttctgggatctgcttttatcattgcaaagtcaaagctctgttcaatgtcatacaaacacgaattctcataccaaaactactgacatttacactgagaagaagcaatagtgggtaaaactgctaacaccttagcatgactcaatgaactagcaccaaactgtattaatagccatagtcattatattatttgctgccacatgtttgcacttaaaaaaagtttcaggccaagcccaatggctcatgcctgtaatcccagtgatatgggaggtcaaggcaggaggttcgcttggggcctggagttttgagtctgcattgagccaggactgccactgcactccagtttgggttacagagtgagatcttgtctcacattaaaaacaaaaaacaaaaaacaaaaaaacagaaccagtttcacttgagaattacctctttgaagcagtaagagttattaattgtattaaatcttgaccttcgaagtacatgtctctgtaatattctggatgatgaatgtgatgaaatgggagtacacgtacacttgaactgcataccaaaatctgctggttgtcttgtggaaagcacttatgcacttgaattgagctgaaccagctgtttttatccatggaccattattttcactggaaagaatgactgtcaaactatgattgttcaaacttgggtattagccttgcagcttttgaggtgtgtggaaatctgagtattctgcacattaaactaaggccatcatcattcattgagctgagtattaggatccgcatttcctggtggtgtattgagccagaaggccagctcaaaggcttcatttgtaactttcatttttaggtcaccctggcttatgaacattagtacattgctttttgggaaaaggacacctaaataggaagcttttatcaaaaaacttaaaagcacatttttctcatcctccattcacactgagaacaactaggagtagtacgtcaggtcctctctctgtgggtccggggaagcccattgatgagcagcttttggcttggcttgctcatttcaggtcagtcgatcaagcagccttaaaatatccactggtgttcaaggagtcatttgatcctcactcccttcctgttcttctctctggaaagctcagaactacctgtcctacttttcttcaattcagaggctctcttcccagaaagctgcagtctacttactggatttcatgaacagacacttctcaaaagacgacacacaagcagccaataaacataaaaaaaaaaatgtccaggctgggtgcggtggctcacgcctgtaatcctagcactttgggaggccaaggcaggcggattgcctgagctcaggaattcgagaccagcctgggcaacacagggaaaccccatctctactaaaatacaaaaaattagccgggcatggcagtgtgcacctgtagtcccagctacttgggaggctgaggcagaattgctcaagcctgggaggtgagggttgcagtgagctgaggtcatgccactgcactccagcctgggcaacagagcaagactgtctcaaaaaaaaaaaaaaaaaaaaaaaaaaactaaacaaaacaaaagtccagcatcactaatcagacatgcaaatcaaaaccacaatgagataccatctcaaactagtcagaatggctattaaaaagtcagaaaataacagatgttggcaaggttgtggagaaaagaatgcttatacactgttggtgagaaataaattagatcagctagcccctgtggaaagcagttcggagatttctcaaagaactaaaaatagaaattgctattcaacccagccgtcccattactgggtatatacccaaaggaaaataaatcattctactgaagagacacctgtacttgcatgtttatgacagcacaattcatggtagcaaagacatggaatcaacccaggtgcccatcattggtggactggatgaagaaaatgtggtgcatatacaccatggaatactatgcagccataaaaaagaatgaaatcatgtcatttgcagcaacatggctagagctggaggccattatcctaaagtgaagtaataatagaaacaaaaccagatactacatgttctttcttagaagtggtagctaaacattgggtacacacagtggcagaaactggaacagtagacactggagacttcaaaaggagggaagggggcaagggttgaaaaactacttattgggtactatgtttactacttgagccatggatcattagaagctcaaacctcagcatcagcaatatacccttttaacaaacctgcacatgtacccccaaatcttaaacatactgggctcctctgctggtcactccccttcccagtcttcctaggcatcatctattctttatcctgcccttatttatcctgcctccacagtacatttcagccatgcagaccccacaaaattcactacttgtggctgcttgtttgtcacccacacacccatcagtgcttagagtctcttctctggaagtagggctgttttcacatgtccatttacagtctactgctttctagatttctctcctttaactctctacactgctacaattaaagtgaactacatattgctcttccctttttataaaaattctatttcccctccctttgttaattttgctcagaatgctttgttcttccagaaagtcttttcctattccatttctgtagccccccttttatctagaaaaaagtctctctgaacgtctgtagcacttaacataaacttccttgagatacacttcattttttactaacatgtggacctatctacatctctcccctattggactggaactccccgtggccgcgatgtcttcactaatgcctgtgttcccataacgcgccatgtagacacccaggaataacctagtgaatgaatggaagatttctcggtttttgtgcaagttctggatccagcaaactgaagatgaaaagttacttccaaaggctcagtttatcccccttctcaagagactctggttagtgatcagccccatcagtcagctcctgaaggaaccagaagcctaccccaggtgggggtaagctgctttcttccagggaggagtggttaactaattggtaaaaagttactcagctggagaatcccccaggagttccatgacctagttcccattcccagaggggaagtggagcttccctggaaagatggcgcacctgtgcaaaatactcctcagagatcctcccagcccattcaatgcacaggtccaaggggcggcatgggttggccacgtcagcacacttaatcatcatgcgtttgatcaggatttggttttcagggaagttcttcccagcagggttgcattcacagtcgctgccttcaatctggaaaacagatggtcagatcaggcttggttcaagatgacggtgaagcccacaagggttaattcgccaggcattcgatggtgatcaccgagcacacaggtaggactgggactcggcgaaggcagcttttccttttttaaattccatatataatatactgacacattctttaaaaaaagaatatactgatacagtcttaaaagacactcagcaatacacacacacacagagtttgaaagttgaaagtccctgtcaccacctgtctacccctcacatccattttcttccctagaggtaactgctacagcagttttgtttttattttgagcaatttgatatgtaatcttagaggaaatttctcccagtttttttaaaaaaatgtgtaaaagcagagcttttagctactttaatgcatttcaggtagggcagtggcacatacatgtaacccttcaattatttcttgatttctactacttatgcctaccatctccctccctcctatgacctgtcccacccccaactcacccaactctctcgcactttggttctcctaaggcatgtgtccactcatgttttcttggctgttcttctgactggctggtaagtgagccaggtaggcgtggggtccttggagtaggaagtagtcaggagcaggtgtgttcagccatgtttagaaagactggtccacacctagtggtgatgtcagtgtcctgagccatgtggccaggacacgagttggtacacacatcacaggccatttacatagaacctgaaagattgttattctccacttttaaagacaccatcaaattgattgtgtaaaaacaattaggtctccagagctctgccaagccaaaaggctgcatgacatttggggggtttaagactggacctatttattagactatcaatgggcagaatatgttctggaggtttttgactacttatcaaagtaatactgtttactataaatactgcagttaatagtaagttgcagtgcagaggtgggggcttacatgagtggatgaccttcctagttctatgaatctctatacttttccttctctaaatccccagatccttgctcctgtaagtcttctgtggaaggagagggctctggtgttgtgctgtggaatccctgggggaaggggcttaaataggtgaggtagacactgtcactccatccagactggtcatgggatgggtcctacacagatcatctccttactgagcaagttactcatgatgatcattcacatccatccagtttgccaacctctgccgctcaacaggaatgagcggaaagcttttctacctttatggggttatgaacagcttcatggcttcagagaacagtggatcttattaggtgtgaaccttctgtttcatgttcctaaaagccaaattggtaaggaccttaaggcaggtccaaggtacatgagtaggttttaaaaaaggaaaacacaataaatgcttctgctttccagtcactcccagttttatgatagtcttcaggtactggtatgcttttaatgtgaatcaggaacattctttgttttttaaaacaccttccaactttgaggttttccaagagctcagtgaacagagaagtaaaggctttggattctctaaaataccaccatttatgccagtctctgttcgtctgcgtctccttccatattctttgggccaagcttttctggtcagtactggctttttctcagggcctttctttcaaggagctcagagttgctgtggacacagtttattttcatccccaaggaaaacaagtggccagtcctttcagccctttatcaactccaagtaaataaccaccttacatttgagtg

SEQ ID NO: 95736 - DNA, 184408 bp, Homo sapiens
  misc_feature (1)...(184408): n = A,T,C or G
gggactacaggcacccaccaccacgcccagctgattttttgtatttttagtagagacggggtttcactgtgttagccaggatggtctcgatctcctgacctcgtgatccacctgcctcggcctcccaaagtgctgggattataggcgtgagccactgtgcctggccaactctatctaaaaaatacacacacagcccagaatattattaaattttagctagatattgttgttcatggaaagttctcaacctaagacgttctttttctttccaaaaaaaacaaaaaacaaagggttgggaaaggactggattggtaagtgttagagagagacacagttggttgggcacagtggctcacgccaggcttgtaatctcagcactttgggaggccaaggcgggaggatcacttgaggccagaagttcaagagcagcctggccaacatggtgaaaccccctctctactaaaaatacaaaaatttgccgggcttggaggcacacacctgttatcccagctactcggggggctgagacaggagaatcgcttgaacccgggagatggtgccactgcactccagcccaggtgacagaaggagactctgtctcaaaaaaaaaaaaaaaaaaaaatgacacacacagtcttattagagattttaaaatgatttaacatcacattctagcccagtggctcttaactagggacaattttgtctccccaggagacatttcatgatgtgtgaaaacatttgtggttgtcacagctggtgtgaggcagctactggcatttagtgggtagagaccaagaatgctgctaaatttcctgtaatgcatagcacagccccccatgataaatattcagcccaaatgtcaatagtgccaaggtagggaaactgctttgggggatacctagaatgtttattcagagagaattcatggagagagaattgtaggcactaaaaggattttattttctcactcccagcctgagtttacccaaagcatatttattatttattcccattttccctgcctcctccatctctcatcactgcccgtacccttgacttcttgcccacttaccaccaaacactccttctttacagcaggtccaaagtagcagtggggcagggcgcagtggctcacacccataatcccagcactctgggaggctgaggcgggtggattacctgaagccaggagctcgagatcagcctggccaacatggcgaaaacccgtctcaactaaaaatacaaaaattagccgggtatagtggcgcgcgcctgtaatcccagctacttgggaggctgaggtgggagaattgcttgaacctgggagttggaggttgtagtgagctgagatcatgccactgcacttcagcctgggcaacagagtgagactccatctccaaacaaacaaacaaacaaacaaataaataataaagcaggagtgggcttggaggtctatgaacataaggcttcatggtgggccaagatgagagtttcaaggtatattccggctccagcctgtcatccatcgggcatggatggcatgtgacatagaggcatgtgacatgacctctttgggccacagtctctctgatttctggaaagtagaagttggactagattggcttatccctccaggacctttccactccacatacctaggagtcaggggtgcactgtacccaggacctattggatggagaggattgtcaaggggcttttcctgaggaagcagaaccatgaggtgactattcctgggcagaaggtagtgctgtgtcaggaagaggggttgctgtatacccagaagggggcctcagattaacctctcacatctcatcacttcccccagccttgcccctctcctagaccctggcaccgctctggtgatcccttgggtgtctcgcttgtcccaagcaggcatctgattctctctcaagatgagatttaagcctgcaggtgcgtcccttcctgagggattaccttgctgaaaaggagtttcggcctggtgcagtggctcacacctgtaatcccaggacactaggaggtcaaggcaggaggatggcttgagcccaggaggtcaaggccagcctgggcaacatagtgagaccttgtctctataaaaaataaaataaattagcctggcatgcagtgcacacctgtagtcccagctacaatagagcaagactctgtctcttaaaataaaaacggccatgcgcagtggctcatgcctgtaatcccaatacttagggaggcgaggcaggtggatcacctgaggtcaggagtttgagaccagcctggctaacatggtgaaacctcttctctactaaaaatataaaaattagccggtcatgttggtgtgtgcctgtagccccagctactcaggaggctgaggcgggagaatcgcttgaacctgggaggcggaggttgcagtgagctgagatcatgccactgcaatccagcctgggcagcagagtgagactctgtctcaaaaaataataagaataaaaacaaaaaggagtttttttaaatgtattttctcctctgattatgaaagcgtactaaagaaaatttggaaagtaaaggccggttgcagtggctcacgcctgtaatcccagcactttgggaggccgaggcaggtggatcaggaggtcaggagatcgagaccatcctggctaacatggtgaaaccctgtctttgctaaaaatacaaaaattagctgggcatggtgatgggcgcctgtagtcccagctactggggaggctgaggcaggaaaatggcgtgaacccgggaggcggagcctgcagtgagctgagattgtgccactgcactccagcctgggcgacagagtgagactccatctcaaaaataaaaataaataaataaagaaagaaaatttggaaagtaaaaaggcaaaaacaaaacaaaacaaaacaaaaaaccacctacaatttccccctctctttccatatgagagtgttagtacctttgagggttaatagtgggctctttcatcttttaaaaacttatttaaagaaaaaattattgcaaaagcaacacgttttgctagagaaaaagtagagagtattgacaaaacaaaagcaatgaaatatttaagatccacctggatgtaccgcaaaatgttaataagggaaactgtccccatgactggggacatggatataggatggggacatatgaaactctctgtgctaattgcttatgttttctataaatggaaaactactaaaacaaaaaatcctgctaattaaattgtattttaaaaacccacctggaatctttcagggatgagcattgataatgctgttgtgttcattcttgaattagggaaaactatgaatattcatatcatagaagtaggacttttaatagctaaccttttctttcttttttttttttttttgaaacagagtctcgcactgttgcctgggctagagtgcaatggcatgatctcggctcactgcaacctccgcctcccgggttcaagcaattctcctgccttaacctcctgagtagctgagattaccagtgcctgccaccatgcgtggctaagtttttgtatttttagtagagacaggatttcactatgttggccaggctggtctcgaactcctgacccgtgatctgcccgcattggcctcccaaagtgctgggattacaggcgtgagccactgcgcccggccgtgcccgggtgattttaatatatttttgtatttttgttttttagtagagatggggtttcaccatgttggccaggctgatctcgaatgcctgacctcaagtgatccgcccacctcggcctcccaaagtgtcaggattagaggtgtgagccaccgcgcccggcctccttggtcttctcttgtaccctgtgtagtagtggggttgagaagagggtgtggagtttgaaagggggatgtctagcaaagcagatgggagatggtgggacccacactgatgccataattggtgtgtcagggtgtttatccttcttccatgcaagaagcctttattgagtgccaacttgtgccatgctatgtacgaagcatcattttagatgtagaagagacagcaggaagcaaagcacaccaggcctgttggctggagaatgctatttcctctccaaatgtgcaatgcagcaattactaatgacatgcttcttttcttgaggaacttctctggtgcatgagataagtcacacttcttggtttgagatccacctcagacactgggatatttggtggctccatcctgtgtgacagcaaacacaaaaggcatccacttgctggcagttagcactaacttaaaaaaacaaacaaataaaacaaaataaaagggccaagcgcagtggcccgtgggagcagggaaaggcttctggtgagagttggaaaggtggactgggccggatgctcttccttcatcccaattaaatctctatggcatttagcaaatgccaaggaagagcccagcactttgggaggccgaggtggacagatcacatgaggccaggagttcaagaccagtctggccaacatggtgaaaccccatctctactaaaactacaaaaattagccaggcacatgtataaccccagctacccgggtagctgaggcaggagaattgcttcaacctgggaggcagagattgcagtgagctgagattttgccactgcactccagcctgggcgacagagggagattctgtttcaaaaagaaaaaaaagaaacggcgtccaacatgatcagtcattagatgtaactatgtaaaagtcagctttagattagtttatatggtattattacaatttcaggctctttagttacatattgatttttaaactccctcactttgttccttccctctgttttttttttcctgctctcataactttatcaggcctttgaaaagttcatgggtcccagacactgtgtgggagggtgtggaagtgagtgtggatgtgggctgcggtggagataggtgtgtgtgtgagaccgtgaatcacagtgacaggtaatgcagggtgactgtctgaggcctgagagtggggcccatgtgcaagcccaagaaagtggctggtgtgagaatgagggtgttcagactattgaagggtgtttggatgaaagaggcaggtgcgtgtgtgtcatggtgagttcccagaatccagatagagaatgagggtgaggatggtgaaggtcagagggtgaaggagtctgataagctgagggtccctgtgtgactgtgatttctgcaggcacatgggtgtgaggcttgagaaactgggtgcatggatgatggtgaccaacaggagggtgagagtgttatgtgtgtgtgcaggactcacatgtgattgtgaatgttagatgttgcaggcagtgagcagtggcaggtgtgtgtgtagggcctgggcgtgaatatgcacgttggtgcaagagtgagtgagaatgactgactgatggggtgagcgtggccgggtgcccgtgtgattgtgcatgtcagatattggtggggatgagtgtcacagcgcgcgtgtatagggctgggatgtgattgtgaatgtgggattttgcggggggtgcggtggcagggtgcgcgcacggcgggcgtgggcggggggcgcgtggccgggtgggcgcgcgtggggggcgcgggcgcgggccgggggcggggacactgcagcggtcgcggcggcgcggacacggcccggccgccccccgtggcaggcgcggcgcggcgcggagcgagcgggcgcagcgcggagctcgggcccatggtgcgcccgtgtccgtcggtcgggccgcgcgggcgctccgcgcgtggcccggcgctcgcgagctcgccccctcgctgcgggcccggcccgcccgctgccgccgcctcctcccccggggcggcgcggcgccggcgggcggcggcgcggaggccggaccgggcggcggcccaggcggcgcggggggcgcggcggccaaggcgggcggcgccgccgacatgacggacaacatcccgctgcagccggtgcgccagaagaagcggatggacagcaggccccgcgccgggtgagtgggcctgggcccgygttttcctttgtccgcgcctcccggagcccggcgctcgggccagcctggccgggcctgacaggttggccgcgcgccgcgcccggcgccatgagcctggggcagggctggggaggcggggaggtggggagggggtccctgcgcttcagccccgggcggcacctagcctgatgccggccctttggggttcgagcgcccggttgcctgggcctccttgcccaccttcctttagaaaccccgagaagccgggcccgccccagtgctgtttacacactcgcggaattcggatcagccgtgctttctcaccgttttattgttccgtaattaatatctgtccgtaattaatatctgaggtaacaatttggtcagtgtcacaccgagctctgcgcttggagcattactcgggagcccagatatgctcagcttttaggggggcgcggcctacgcctcggggtaccccatcagcgcccctgggtcccagccccaggaggctgcgccgagaccacctgcgctccggtggccccttccccctccgcccggggtggacccgaaccagcagtcgcaggagggtgggagggtctcctactggccgcttggtgacactaccccttgtgttctccccccacaatttcggggaaggaatcccacggctgggacaggggctgccacctgctgtgcccttcccgcagtaggagaccccgagggcagcttaggcgcggaacaggcaagggtttttctgcatttgggaagaggggacgggttggtattttgcgcctcgccgtcttcctgttcggaggatggcagcgtgacgcgttgaggtttgcggggctctcgtatcgcctgccatagacttacctgggcgtgaggggcgggggtgggaaggacgggggtgggcgctggtgcaaatgcagatttcccggcccccgcctagacccgccaatcagagttctggggggcggggcctggagatgtgcagctccacaggccgcgcaggtgaggctggagcccgcgggaggctgagcgcggtgttgggcggggcctgcggccgctctgctccgcccttcctcgggcgtctggtcctctctgggcatttcccggtggcggccgcttattgcagcgtcagttgctcggaacaggagacgcggcgggtggagtgaaccataagggtggcttcaccaggtgtcagtggaattaaaaaaaaaaaaaaaaagaatggtgctggcggccattttgtggggtctttgtccctggcttcctgaatcctccgaagaagaggcctcactgatattacccagaggaggaaactggaggttacggaggttaagggctatagggaagactgcaaaatggagattgaactccggattgtctgacccaaagatagttccctcactcctcccttctctgttttgcgtttattattattagtattattattattattgagacggagtctccctctgttgcccacgctggagtgctgtggcgagatctcggctcactgcaacctccgcctcccgggttcaagcaattctctgcctcaacctcccgagtagctgggattacaggcgcccgacaccacgcctgactagtttttgtatttttagtagagacgggggtttcaccatcttggccaggcttgtcttgaactcctgacctcgtgatccacccacctcggccttccaaagtgctgggattacaggcgtgagtcaccgcgcccggcctccttcgttttaatgatgacaattgacttgaacactatgcctggaacagtgcctggtacatcgtacatcctcygtaaatactgtgatgaattaatatgatcagtggagtctaaaatccagtggttattaatttgtgccatgagcaattatgagacgcctactatgtgcaggagccactccagctgatggggatgcaaggatgaattaaagaagacctgcccaacaggtgtgggtgtcctgaccctggctgttcattgcaatcaccagggaaacttaactagccttttctgattcattctagacctttgaaataagaatttagggtgggacctgggtttctatctatatattttaataagctcccctgatgattttaacatgcagtcagagttgagaacttttgagtcagtacatgaaagaaaaatgcaaatattgttcaaaagtgatcattagcgtgatagaaacatgagccgttcatatggagagccagagggagtggtgcagataattttatttaaaagtaagttttctaggttgcgttggaatggagcatcacagcccctttagaatttaccagctttggaactaatctttctttttttttgagacgatgtagtttcactcttgttgcctggagtgcaatgccttggtcttggcccactgcaacctctgcctcctgggttcaagcgattcttctgcctcagcttcccaagtagctgggattacaggtgcccactaccactcccggctaatctttgtatttttagtagagagagttgtttcaccatgttggccaggctggtcttgaactcctgacctcaggtgatccacctgccttggcctccgaaagtgctgggattacagacgtgagccaccgtgcttggcctggaactaatctaattctgttttttttttttgagatgtagcttcactcttgttgccaaggctggcacgatctcggctcactgcaacgtccgcattccaggttcaagcgattctccttgaatcagcctcctgagtagctgggattacaggcatgcaccatgcccggcaaattttgtatttttagtacagatggggtttctccatgttggtcaggctggtctcgaactccttacctcaggtgatccacccaccttggcctcccaaagtgctgtgattacagatgtgagccactgtgtctggccaatctatttcttaaacagtgacatggatttggattcaaattgtgtatcagggttgctgtgcatttgcgtaaatgctcttgtatataatctgcattttcaggagtagcaacatcaaggtggaatcctgaagtttagaaactcttgagaagcacagagagatggaggagcttcctgaaatagaactaggggctgggggatggcagcgtgagggctaaagtgggtgggtggttaaaggaagaaaaaagtaatatgtaatgggtcaggctgtctgctggacacttgagataaatagggctgttttaatccttacaacaaccatgtgagtttttggagttaattctcccattttaggggccagatgtggtggttcaagcctgtaatcccagcactttgggaggccaaggtgggcggatcactcgaggtcaggagttcgagaccagcctggccaacatggtgaaaccctgtctctactaaaaatacaaaaattagccgggtgtggtggtggtgcctgtaattccagctactggggaggctgaggcaggagaattgcttgaacccaggatgtggaggttgcggtgagtcaggattgtaccactgcactccagcctgggtgaagaagcaagactccatctcaaaaaaaaaaattctcccattttattgacagggaaacaaagattcactgatattaatgtgttcgtggtcttggaggttgtgagaggaggcagttttgaaccggatccacccatttcacctaatggttctaggcaataaagctgtggaatggttggaagatttgtggttaaaaaaaccaaaaacgatgccacatgtcataggggacagaatgcagttatttctggggtcactcagcgaatgttgcgaagacgtgcagcttatttttggaggaatctcctggcttcaaagttcttttctctcttgagaaagttaccacatcctgatgttgagaaaacttttgaaatggtgtagttaggaaacaaggcatttcacctccattgctggaaaccattttatgacatcatgccctttgcttatggctgaatggagctcctcttgtggtgaaatggcagggattatttgttaggagccaggacgcaggagtccattgaggagctgggttcacacccaggctctgctgcttactagctgtgtgatcttgggaaaataactttacctctctgagtctcagttgtttcatctgtaaaatgggaatatcaataattatgtatctcatagttttttagtccatgtaaagtttaggagaataagtgctcagtatgccttaggtgtttactagggctaatggtaatccttaggtgtttgcatgaggtttaccgttggggtctacagtgtgcttctttgagaggaggggccttttatgagaaatttagaaatatgaatttcactgctttttcctgatcaaatttaggaaaatgaataactatgtagagcattctgtccaggtatgtcgaggccctggtgtgatgttgtggcaaggatgggagcttaggtaccaggtggcccaagactttgcctcattgtaacaatctacgttttgtgggtggccacactggatgaggatgctttgatgcttgatatatttggatttgggggactaggaagttttgaatatgaatcagattgagaaagaagaactgaatagatatgttgtctaccacaatgttttaaacagctttattgaagtataatttatatagcatacatctattgaaagtatgtaaactggccaggtgcggtggctcattcctgtaatcccagcactttgggaggccaaggtgggcggatcaggaggtcaggagatccagaccatcctggctaacacaagtgaaaccccatctctactaaaaatacaaaaaattagctgggtgtggtggcgggcacttgtagtcccagctactcaggaggctgaggcaggagaatggcgtgaacccaggaggcagagctggcagtgagccgagatcgcgccactgcactgtagcctgggcgacacagcgagactccatctcaaaaaaaaaaaaaaaagtatgtaaaccattgattaaaaaaaaaccaggtgtatggagttatgcaaccatcactccggcatgggttttgaatgtttccatcacctccgaaagtctcctccagcccatctgcaattcatccctgcccttgccccagtcccaggcaaccagtgatccgctttctgattccataggtttgccctttctggaaattgtctatcaatggaatcacaccacgtgttgccttttgtgtctggctgctttaatttagcatgaagtttttgaagtttctttttattgtgtaatagaatttcagttgggcttggtggctcacacctgtaatcycagcactttgggaggcccaggcaggaggattgcttgagccctggagttcaagagcagcctgggcaacatagtgaaaccctgtctctacaaaaaataaataataataataaaaaaagccaggcatggtggcttgagcctgtggtccttgctacttgggaggctgaggtaggaggagtgcttgagcccaggaagcgtaggtggcggtaaaccctgatcataccgctgcactccagcctcggcaacagagtgagaccctgtctcaaaaaaaaaaaaaaaaaaaaaagccatttgtggatatatcaccttaaatctttttgtttgtttgtttttagacagggtctcgctcttgtcacccaggctggagtgcagtggcatgatctctactcactgcaacctccacctcccgggttcaagcgattctcatgcatcggcctcctgcgtagctgggattacaggctcccgccgccacgcccagctaattttttttttttttttgagacagagtcttgctctgtcaytaggctggagtgcagtggtgtgatcttggctcactgcaacctctgcctcccggttcaagcagttctcctgccccagcctccggagtagctgggactacaggcgcatgccaccacgcccagctaattgtatttttagtagagatggggtttcaccgtgttgaccgagatggtctcgatctcttgacctcatgatccgctcaccttggcctccctaagtgctgggattacaggcgtgagccaccatgcctggcctaatttttgtatttttggtagagacggggcttcaccgtattggccaagctggccttgaactcctgacctcaagttatmtgcccaccttggcctcccaaaatgctgagattacaggtgtgagccactgaccctggcccggcccagtgttatcacagggtccttaaaagcgaaagacaggcaggagagtgagtgtcagcataagagaaagattgggagaggctgcactgctggcttgaagagggaagaaggggccatgagccaaggaatgcgggggactctagaagttggaaraggtaaggaaacggactcggttggagcctccagaaggaacacggctctgctgacaccttccttgattttagtcccatgaggcccattttggacttcggacctaactgtagggtaataaacttgcattgttttaagccactcaagttgtgctaatttttttttttttttgaggcggagtctcgctctgtcgcccaggctggagtgcagtggcgcaaccttggctcactgcaagctccgccttccgggttcgcgccattctcctgtctcagcctcccgagtagctgggactacaggcgcctgtcaccacgctcggctaattttttgtattttattagagacggggtttcaccgtgttagccaggatggtctggatctcctgacctcgtgatctgcccgccttggcctcccaaagtgctgggattacagccgtgagccacsgcgcccggccaaagttgtgctaatttgttacaacaatgaggagaagctgtcacacaccgatgtgtgctgcagaccctgggaacggattgtcgtgctcctctttccatcccacaaaggggactggaatctagacaggaagcccgccacctgggtggaggcatcagaggcatttcagaggtcctacattttgcctgagagcatagagcttatgtcagcatgtttatgtgactcattatctgacggtggaggaaaaagatgaatatttatttaggacctgcagtgttttggctctgaactcatgtttcctctttcatgctgcacaatggccctttgatgttggtaattttttttattcttgctttactgataaggaaacaaaaatgccctttctctttgatgtgatggaggtggtgttaggtaggactctcattactctcaggacttacattcttgttttttattttgagacggagtctcactctcactcaggctggagtgcagtggcgcagtctcggctcactgcaacctctgcctcctgggtttaagcaattctctgcttcagcctcccaagtagctgggactactacaggcctgcgccaccaccacgcccagctaatttttgtatttttagtagagacagggtttcaccatgttgaccaggatggtcttgatctcttgactttgtgatccgcctgcctcggcctcccaaagtgttgcgattacaggcgtgagccactgcacctggcatttttttttttttttttgagacggagtcttgctctgtcgcccaggctggagtgcagtggcgtgatctyggctcactgcaacctccacctcccagttcaagtgattctcctgcctcagcctcccaagtagctgggattacacatgcctaccagtatgcccggctaatttttgtagttttagtagagacggggtttcgccatgttggccaggctagtctcgaactcctgacctcaggtgatccgcctgccttggcctcccaaagtgctgggattmcagatgtgagccaccgtgccctgcccagtacttacattctttatttcagtcgttgtgagcactgaattttcgaatatggaaccattgctcttaggggaaatatggggttaggttcctgagaggctctggtcacattatttttgttgactgatcaatgaagaacctcgttttaggtgtgtttctgttttttaaaaaccgcatatttaatgtacgttatggattcattaacatcgaactcacaggcaacaactctgtaactcacgcctggaggcagcttatctgacacgtgtattttttccacgtggcacatcccagccttcctgtgcttagagatactagttcttctgcactgtgctgaggggccattttaaactgcaaaaccatcagggaaaagcacaaaaatgcacaaatcgtggcagtaagagaccacaaaaatgactcctatttgtagtgtgagagctgcaatgagaagccttgtgtcacctcagctgggaatgtgtgtgtctgggggcggggcagggaggagcaactcaccattttggctacactgcacgcatccattagtgactgtgaaggggctgcagctgttgatttgggattacaagtttgagggatttggtgaatttgcaaatacagaaattataaattatgaggatcaattgtatatagtggggtgggtgtgtgtttcaatgtccttcctttgacaaagtggagatagtattagatatgtggcatgtaggggtgtgtgtacatcttattttattttttaattttatttattattattattatttttgtgacagaatcttgctcttgtcgcccaggatggagtgtagtggtgcgatctcggctcactgcaacctctgcctctgaggttcaagcgattctcttgcctcagcctcctgagtacatgggattacaggcacccgccaccacgcctagctaatttttgtggttttagtagagacagagttttgccctgttggccatgctggtttcgaactcctgacctcaggtgatccacccacctcggcctcccaaagtgctgggatcacaggcatgagccacygcacccggccgtgtgtgtacattttaacatcctttctttgatgtggtggagggagtattagataccaagcatataggggtatgttttgagggaggggattgtgctggtgggtgaaacccagagacacccccctcctcagccaccgaccttcccctctctgggctggaggagagagttgcaccaacagctctttgcccccctgggatgagaacagtggagcttggcagcggcccatggggctgtgctctctgtcctctgccagcgcccagctgcacttgcgccatccccttcagttacagaggtcctcccttgctctgccttgtgctgaccaaaaccagactagctgctctctgcccacgtggagaccagaagatgtgttgttgcaaacccacagagggactctgaaggatggagtgtggacatgggtgccgtgcctgccgggcttccttgcagacgggctctttcttttcttttttgagacagagtctccttctgttgcccaggctggagtgcagtggtatgatctcggctcactggaacctccgcctcccgagttcaagcgattctccttcctcagcctcctgagtagctgggattacaggtgcaggccaccatggctggctaatttttgtatttttagtagagacggggtttcaccatgttctgcaggctggtctcgaactcttgacctcatgatccgcccgccttggccttccaaagtgctgggattacaagcataagccrctgcgcccagcccaaaagggctctttctacctactgtacagctggctggcgagaggaggtccctgtagtccagtccgcaaggagatgggggcaccctttgaccttgacctctgtcttgcatgcaataagttggaaaaaggaggcaaggcatggaaccggccatctttggacttttgtcccttacttctcagaacagaatgttcttttagtgtctttacccagatggaaatgttgaaagtcagtgataagggctggctgtattttatgactgcctttgaaggggtggaggggttgggacgtgtcttcagggtcactcatgaaggtggtgattttggtttaatttggaaagaaaaagactaattataacatttttattgatgacatttagaatgattctgattttaacaactagtatctgttttctctaatttgtgagtttgaaagattaatatatgtatgaaaggttagcaattatttttatgagcccttctgtttgtaccaaatgatacttgctttcttgtgtcatggcaggaagtttccttttagaatttaaataaaaggcagtcaatttaaagaaaaccatgaagtctataaaagttcctgagatttgtaaataccccaagtcatgcctgacatttaggaattagtggcccatgctgaaatggcgcagtctaaacacataatgttactgctacaaggggaaagaaataggatagttggttgtgcttatacatttaaaacctttttttttttttgagacgtactctcattctattgctcaggctggagtacagtgggtgcgatctcactgcaacctcagcctcctgggttcaaacaatcctaccgctgcagcctccccagtagctgggattacaaacatgcaccaccatacctggctaatttttgtatttttttatagagatggggtttctccatgttgctcaggctggtttcaaactcttgagctaaagcagtccgccaacctctgcctgtcaaagtgctgggactacaggcagcagccactgtgcctggccctgcttttatttttgtctaaacagaatttgcagaaactctgggggaagacagttggaagaggccctgtgcgagcagggaaaggcttctggtgagaattggaaaggtggactgggccggatgctcttccttcgccccaattaaatctctgtggcatttagcaaatgccaaggaaaagcctgttggcggcggtccccaaggaagaatcagtttgtagtgtcaacagtgccctgctcctaccgtgggcctggcaggatctcccacgtgccacgggcagtttgcagtgatgagataaagtcaggcttggggccgggcttggtggctcacacttgtaatcccagcactttgggaggccgaggtgggtggctcacttaaggtcaggagttcaagaccaacctggccaacatggtgaaaccctgtctctactaaaaatatgctgcgcctggccgatattttgggtttgatgattccctgttatggaggctgtcctgggcattgtaggatgtttagcaacatccctggcctctgcccactagatgccagtgccatcccctccccaccttgtgacaatcaagaatgtctccagacattgccaagtgtcctctggggggtgaatggccctcagagccactggactaaggaagctgatactcactgagtggccatagtccttttaaggtgtctcatcctgtctttttaaaaaaaaaacaaaaccgaaaacaaaactcaagacacctgttggatgagaaattcatatagtctggactattgttcttgctatgaggtcagctttctgatttagtaattaaggaagccttgtgctgttagaacatttgggaaatgttgcagacgtggatcccccacacctccccaaattcacgtttgaagctggaatccccagcacctcagaatgtgactgcatttggagacagggggcctttaaagaggtgatcaatttaaaatgaagctgttaggatgggcccttttccatccagcccggtgaccttataggaggagattaagacagaaagagaggctgggcatggtggctcacacctgtaatcccagaactttaggaggctgaggcaggtggatcacctgaggtcaggagttcaaaaccagcctggccaacatggtgatatcccatctctactaaaattacaaaaattagccaggtgtggtggcgtgcacctgtaatctcagctactaggaaggccgaggcaggagaattgctttaacccaggaagcggaggttgcagtgagccaagatcatgcccctgcactccagcctgggcgacagagcgagactccatctcaaaaagaaagaaagaaagaaaaaaaaaaaaagacagagacaccagagaaaagaccgtgtgaggacacagggggaaggtggctgtctgcaagccaaggagagaggcctcaggagaaaccaaccctgctgacaccttgttcttggatttctggcctccaggactgtgagaaaataagtttctgttgtttaagccatccagtctatgatattttattatggcagcccaaggaaactaacgtagaaagcgtctcatttattgccatcttggcatgtgcagtatctcttagtgttattaagcttttatttgaaattaatgtcatgaatagtgcagctatgaacttttttttttttctttgagatggagtctcgctctgtcgcccaggctggagttcagtggcacgatctcggctcactgcaagctccgcctcccaggttcacgccattctcctgcctcagcctccagagtagctgggactacaggcgcccaccaccacgcctggctaattttttgtatttttcatagagacgaggtttcaccttgttagccaggatggtcttgatcttgtgacctgcccgcctcggcctcccaaagtgctgggattacaggcgtgagccaccgcgcccggctgctatgaacattcttgaacacatcattcagtatgtattatgtggctttgctgggccctagggtatatttgtgtttagctttagaagaaaatgataattttccaaagcaattgtactaatttatacttccaccaagctggtcagttgttccatgtcctcatcaacacttggtattgtccgtcaccttttgtttcagccattctgataggagtataatggtattataagaaatttttttttttttaattgagatggagtcttgttctttcacccaggctggagtgcagaggcgcgttcttggctccctgcaacctccgcctcctgggttcaagcgattctcctgcctcagcctcctgggtagctgggattacaggcccgtggcaccacgccagctaatttttgtatttttagtggagacggggttttaccatgttggtcaggctggtctcgaactcctgaccttgtgatccgcctgccttggtctcccaaagtgctgggattacaggcgtgagccatcacgcccagccaataaatttatttatttattacttattttttattttttgagacagagtctcactcttttgcccaggctggagtgcagtggtgcagtctcggctcactgcagcctccggctcctgggttcaagcaattcttctgcctcagcctcctgagtagttggggttacaggtgtatgccaccatacctggctaatttttgtatttttttttttttagtagggatggggtttcaccatgttggacaggctggtctcaaactcctgatctcaagtgatccacctcggcctcccaaagtgctgggattacaggcatgggccaccatgcccggcttatttatgtatttattgagacagtgtctcactctgttgcccaggatggaatgcagtggtgtggtcttggctcactgcaacctctgccttctgggttcaagcaattctcatgcctcagccttcctactagctagtattacaggcatgcaccaccatgcccagtgattttttttgtatttttagtagacacagggtttagccatgttggccaggctggtctcaaacccctgacctcaggtgatttgtccacttttggcctctcaaagtgctgggaatacaggcctgtgccaccatgcctgacctaagaaatttattcttctttttttcccgagatggagttttgttcttgttgcccatgccagagtgcaatggcgcaatctcagctcaccataacctccgcctcctgggttcaagcaattctcctgcctcagcctcctgcgtagctgggattacaggcatgcaccaccaggcctggctacttttttgtatttttagtagagacggggtttctccatgttggtcaggctggtcttgaactcccgacctcaggtgatccacctgccttggcctcccaaagtgctgggattacaagcatgagccaccgcgcccagcgttggcttccttttctgtatctgagattgagttttagacatataggttagccaagtcacaggaacactgagcttaaattgtcaagtcagggtggtctgtcctcctgtggggctccaggctccagggcctggccaggcactctcttcttgaatagtttatgttataaggggagcagtgaaaaagtctaatctttgttttcctctaattgaaaaatgagtacatatctatgtaaaaaaaaatgagagaacaggccgggcatggtggctcgtgcctgtaacccagcactttgggaggctgaggtgggtggatcacctgaggtcaggagttcgagtccagcctgtccaacatggtgaaaacctgtctctactggaaaaaaaaaaaccaaaattagctgggcatggtggcacatgcctgtaatcccagctacttgggaggctgagtcaggagaattgcttgaacctgggaggcggaggttgcagtgagtcgagatcgtgccactgctctctagcctgggtgacagagcgaggctcagtctcattaaaaaaaaaaaaaaagaaagaaaaagaaaaatgagagaacagagaaaactgataaaggaaatgctggtattatgttatttttccttcaaagacaatcacaatgaacacaaaccttttagcagatgatgttttcttcctgtttgtttctgcgtgtacattgttttatgactaggaaccatgtagaacgtgggtttgttgttgttgttgttgttgttgttgttgttgttttttgagacggagtctcactctgttgcccaggctggaktgcartggcatgatttcggctcactgcaacctccgccttccgagttcaagtgattctcctgcctccgcctctgcctcccaagtagctaggactacaggtgcacaccaccacgcccagctaatttttgtgtttttaatagagacagggttttgccatatgcaaatgacattttgaatgacagcatatttctttgaatagacatctctaatttacttaaccagtgccttatagtctcacaagttgatttgtattttattttcactttacaagtaatgttttctttttcttttctttctttctttctttttttttttgagacagagtctggctcttgttgcccacgctggagtgcaatggcgccatcctggctcactgcaacttctgcctcccaggttcaagtgattgtcctgcctcagcctcccaagtagctgggattacaggcgtgcataaccacccccagctatttttgtatttttagtagagacagggtttgaccatgttggccaggctggcctcaaactcccagcctcaggtgatccacccaccttggcctcccaaactgctgggattataggcatgagacactgtacccggccacaggtaatgttttcattctgaatcctggcccttcctaaagcaaacaaagagaaagtagagagaggcactgactcctgcccggggcctgagaagtcacctaactgggatcggataagcctgaccaacaaagaagcactcaaaaatgcagttttgtgtgtgataccacagaaaaccagtgcttaagaatcttggccttgtttttggatatttcagagaattgccggctgtttgaaagggcatccagatctctacacactcacagaaaagttaacagaggtttatagcatgaagactaaaaatagctactgttgattcatccgtttattcactccataaatatttcctgagcacttactctgtctctggcagttttaatattagggatatagtggtcaacacgtgcgagagaaatccctgacagtgtggggcttccgttctagtgacacacagtagtttttcttgtaagaattttgttaaactccgttggtgtcttgggtgccagcatcactgtcttaggtattttaagtggattgtcttaatggcatcgtccaatactaggtactgtcattgttttattttccaggaaacggaggcttagcagggttaattaactagtccagggtcccacagctcgtaagctgctgtctcttgtctcccaggtctcagctcagctgtgtctttgggacatctttccagaccattcactctgtaggagccacctaccgctgagtagcatatattttttttttcttgtttttttttkttgttgttgttcctaccttgcccacctacaaaatgtaggctctgtgagagcagtgccctcgtttgtcttgtgagaatcccagtgcttagcacaaaggctggcacctagtaggtgctcagtaaatactggctgcttgattaaatgagcgagtgaataaagaagaggagcggccrggcgcrgtggctcacgcctrtaatcccagcactttgggaggccgaggcgggcggatcacgaggtcaggagatcgagaccatcctggctaacacggtgaaaccccgtctctactaaaaatacaaaaaaattagccgggcgtggtggtgggcgcctgcagtcccagctactcaggwggctgaggcaggagaatggcgtgaacccgggaggcggagcttgcagtgagccgagattgcgccattgcactccagcctggggagagcgagactctgtctcaaaacaaaacaaaacaaaaacaaaaaacaaacaaaaaggaataggagcaacagggcatggtggctcatgcctgtatcccagcattttgagaggcggaggtgggaggatttcttaagcccaggagttcgagaccagcctgggcaacatagggagactccatctctaccaagaaaaataaaaaattagctgggcatggtattgcatgtttgtggtctcagttacttgggaggctgaagtgggaggatcccttgagtccaggggtttgaggctgcagtgagccatgatcgcgtcactgcactccagcatgggatggagtgtgacgctgtctcaaaaaaaaaaaaamaaaacaaaaaaaacccagaaacgttaaaaaatctcaagagttttgcattcctaattcattgggggtataagtggtggcagggcccacaatgggcttcagtgagggtacatgttgagcactggagccagaaggaggataaacaatggaatcctcatctgcagagaaaaagggaattcttccttcctgatgcccctcccttcttccttcccttctttatccgcgtgacccatggctgcaaggaaggagccacgtccagcctcctgcctcttgttggacgtagagctcttagaccccaatgtgtgttgctcatggacgctcccatagcagtgccagctgccatagcaggcttggagggaggaggcaggtgggcttggcagtgccagtggggacccttggtgtgtctctgctgggttcctgccatttggattcctccctaggttgccatctagacaattgagaggtggctctcagattctacaacragatgagattgccagactccagctaagagggctggctccggggtcagcctgctggactcacatcctggctctgtcccttatgggctgcaagaccctctgaggtgcagtgtcctcatctacaagagggcgaggatagaagcccttgatgtaggacagtcgggaggagcaaggcaagtcattcgcgttgagggctttgccacagcgcttggcacacactcagcacttactcatgtttttgcttattgttttggtgtctaggaaattgccttccactggattctgtcctgttttctggaattttttgggctcrtgctgtgtggggttgccagccaggctctgtggcctaggtctrtgttagaacctatgaccgagtgtcttgggtaaacacaaatgcatgaggtgagggaggagtgctgggcactggggcatgtgaaagggcccaggagaatgagtcatcagcccacgcttagtgacggagcacgtttgtgtgccaggcctgggggaggtgaatggtgtctgctctctgacctacaagctcatggcaagatcagaggctgcagacagagctgtgtgctgtttgggcagcggggtgagctttattattttattattatttttatttattttggagacggagtcttgctttgtcacccaggctggagtgcaagtggtgcgatctcggctcaccgcaacctccgcctcccgggttgaagcaattctcccgcctcagcctcccaagtagctgggattacaggtgcccaccactatacccagctaattttattggactttttttctttttttaagtagagacagggtttcaccatgttgcccaggctggtctcaaactcctgagctcaggccatctgcctatctcccaaagtgctgggattacaggatgagccactgcacccggcctattttatttttagattagaaaaaagtgtactgagtcagagtcacatggtttaatacttaaaagctacagaggtgtagccattgcaaagtcagtttccctcccactctctctagtcagctaccctgtacccttccccaggcagccagtcttaccatgttcttctgtattgttctagaaatttttaagcatttatcaaaaaaaccatgcatctttatatagataaatagacatagattttttgtttttattctattattaatataccctacacagtacatgtattgttcacttaacagtacattctggccggcagtggctcacgcctataatcccagcactttgggagaccaaggtgggtggatcacctggggtcaggagtttgagaccagcctggtcaacatggtgaaactgtctctactacaaatagcaaacttagctgggcatggtggtgggcacctgtaatcccagctactcggaaggctgaggaggcagaagaattgcttgaatccgggaggcggaggttgcagtgagccgagatcgcaccactgcactccagcctgggtgacggagtgagactccgtctcaaaaaaaaaaaattctgagctcgttccgtgtcagtatataacaaccttcttcattccctttttgaaattatttatttatttacttatttgagatgtgggggctgtgttgcctaggctgtctcaaactcctgggttcaagtgattctcctgcctcagcgtcccaaatagctgggactacaggcacacaccattgcacctggcctttgatcattattttaatgcctttgtagtattaaattgaatagtactgtagtttgtttagccagtctaccactgatggtcatttagattatttttccattttatttgtctgtctgtctgtctgtctgtctgtctgtctgtctrtctatctatctatctatctatctatctatctatctatctaatctttagaggcgctgtcacccaggctggtcttgatctcttggcctcaagtgaacctgggcctccaaagtgctgggattataggcgtgagccactgagcttggtcagttatatttattttttctaatggtttactattactagaaatgtcacacaagtctttgtgcccatgttagactgcacggaatatctggaaggggaatggctgaagtgaaggtacatttgtaattttgatagcatcgtcaaaatgtcctccctgaggtgatgccatcttggatccttgctggcagtgacagcgcctatttgtccatccttgccattattaagatttttgactttggtcgtaaaaaaaagatatcttggtgtggttttagttttgtataatatttaaaaattgaatcagttgccaacattttataactgaatatttgcttacagaatgtctttgtcttgcagaatcagatggtctaggcttgtgtaggaactggactggcggtgtgccccatcccactggaccctgtgtttattttcattcattgttttttctcctcctccctcctctcttctttctttccttctccacctccttctttcttcttttcttcttcttccatttttaaaaaataaatagagatgggatctcactatgtaacccaagccggtctcacacttttggctgtaagtgatcttcctgcctcagcctttcaaagtgttgggattacaggcgtgagccactgcacctggcctatgtatttttttatgtggcttgctgggcccctgtaggtttgagtttgccagtcctggtctagagagaaacagaccagtagagtctaagagagcccagaactgcttcctcctctccttgtgaagagcacagagttgggtttggaaggatagatagaagacaaagggacaggcttgcaggaggatgtctggtgtgagtgggtcttacagacatgttgggtagtttgatagaaatggaatggtggggaaagatgagagcatagggttccggggcatgcctgccttggctgcaggagggtggcttggtaaagggacagcagagatgaaaaggtgagaaggtgagagccttggacttgagtctgatagctgtaggatctttgtgggagtgggtcgacacacgagtcatacttctataagaggagtcaggtctgctgagcagcagaatacccacagggaagactcagagatggagaaacagggaaaggcgacagtcccagcatccctgactgcccatctgctggaagcacctgtggtaacagtcatggggcagaggaggtgtttgttcctcagtgctttttcctaggcttatattaacacatattttggtattaaaatacaaaataataaattacatgtttcttgccttctttttttcttcccatttaaccacctggatctttccctggagtgtatatgtctctacttccttcttgcaattggtacaaatccattgcacagggggtgcctttgtcatttccggggtgttgccctgtctattgccgctgtgaacatcctcgtgcatctcccataggaccagagatcgctccctacctccctctggcaggacttgctgggtcagaggacctgagctttacatttaaagagaagctgccacattgacttggcttttctcatgaggtgattgatatattcccatttctcctccagacagtagcatttctgtggcagggatgtgttcagacttcagacttcgcttctttctttgcatccttcctgacttaggttttgtattctcctagttaaacaggaaaaaaaaaaaaaaaaacgaaaaacccagaccttagatgtatttagaaggaasagcaaaagtttcccttcatacctttccttccactcctttttcttttctcttttttttgagacggagtctcgctctgttgcccaggctggagtgcaatggcactacctcggctcactgcaacctccgcctcctgggttcaagccattctcctgcctcagcctctggagtagctgggattacgggcgtgcgccaccacacctgattgatttttgtttttgttttttgagatggagtctcgctctgttgcccaggctggagtgcagtggcgtgatgttggctcgctgcaacctccaccttctgggttcaagcaattctccttcctcagcctcctgagtagctgggactacaggtgtcccccaccatgtccggcccattttttgtatttttagtagagacgaggtttcactgtgttagctaggatggtttcaatctcctgacctcgtgatctgcctgtcttggcctcccaaartgttgggattacaggcgtgagccacygtgcccagccctgactgatttttgtgtttgtagtagagacagcgtttagctatgttggccaggctggtcctgaactcctgacctcaggtgatccgcctgccttggcttcccaaagttctgggattacaggcgtgagccaccgtgcccagcctccttccactcctaactgccctcttaacaactgctgtccataatggtaccacgtggctatttcaatcagttaagtgaatgaaataaaaaattttaaaaacttttattttaggttcagggctacgtacctgaggttacatcagtaaactcatgtcaccggggtttgctgtacccaggtattaagcccagtgcccaacagttatcttttctgctcttctccctcctcccaccctctacctgcagatagacccccagtgtctcttcttcccttctttgtgcctgtaagttcttatcacttagctcctacttataagtgagaacacrtggtatttggctttcttttcctgtgttaatgtgctgaggataatagcctccagctcaatccatgtcctgcaaaagacacaatcttgttcttttttatggctgcgtagtattccatgtgcatatgtactacattttctttatccagtctgtctttgatgggcatttaggttgattccatgtctttgctttgtgaatagtgctgtagtgaacatttgtgtgcgtgtgtctttatggtagaatgatgtatattcctttgggtattgaaataaactttaaatgtcacattttgggtactcagcagccacatgtggctgctggctactgtgctggatgatggtgcagtatagaatgattccatcatcacagaagcctagtgggcagagctgctccagagcagggctctccaccgcaggactattgacatttggggccagattacactctctggtggggggtctcctgggcattgtaggatgtttagcagtatccctggcttctacccactacgtgccagtagtgccctacttccctgtagtagtgacaatcaaacacatccctagacattgccaaatgtctgcagggggcaaaatccccccgccctgctattgagaaccactgctgttgactaattcataacggcttttaatttttttcctttttttttttttgagacagaatctcactctggctggagtgcagtggcagaatattggctcactataacttcttcctcctgggttcaagcgattctcctgcctcagtctccccaatagctgggactacaggcacccgccaccatgcccagctaattttttttttttttttttttagacggagtctcgctctgtcacccaggctggagtgcagtggcatgatcttggctcagtgcagcctctgcctctcgggttcaagcaattctcctgcctcagcctccccagtagctgggactacagccacacctggctaaattttgtatttttagtagagacggcagggtttcaccatgttggccagaatggtcttgatctcctgacctcttgatccacccgccttggcctcccaaagtgctgggattacaggagtcagccactgcacccggcccatgcccagctaatttttatatttttagtagagacaaggtttcgtcatgttggccaggctggtctcgaactcctgacctcaagtgattctcccgcctcggcctcccaaagtactgggattacaggcatgagccaccatatctggctacttttaatttttcttcatgttcttcttggatctgcccagcgtcaatgctgagactgttctttcctggaccctgtaacttcctggaaggttggtgtgtcatgcagacaattcagcaaatatttgcgcagtgctaactgattataggggaactcccagcagagatgatggtttctgtggaggccaactccttgttacattagttacctttttcagaaacattgttcccttggctctgctcctctaatatttgcttttgcatttcagccagattgtatgaaaccattgcacatctggttagcagactatctgctgttaaaacctttatttgtcttaaagtcaaatcctaagaaaatcaattttggttttcctttatataaatggtctaggctgggcgcggtggctcatgcttgtaatccactttggaagactgaggcaggtgtatcacctgaggtcaggcgtttgaaactagcctggccaacatggtgaaaccccatctctactaaaaatacaaaaattagccggctgtggtggtgcaggcctgtagtcccagctactcaggaggctgacatgggaggatcacttgagcctgggaggcggaggttacagtgaaccgagattgggccactgcattccagcctgggtgacagagtgagaccctgtctcaaaaacaaacaaacaaaaaataaataaaataataaataaatggtctaagcaggaagcagtgtaaacgaagttatttataaacttacactttaacctagttgaatggctgttatcaatgggtgagaaagttatttcatattttcctttttcatctggaaaaataacttttttttttttgagatggagtcttactctgtcaccaaggctggagtgcagtgccagaatctcggcttactgcaacctccacctccagggttcaagcgattctcctgtttcagcttcctgagtagctgggactacaggtgtttgccactgcatccagctaatttttgtatttttagtagagacagggtttcaccatgttggccaggatggtctcgatctcttgacctcgtgatccgcccgcctcagcctcccaaagtgctgggattataggcgtgacgaccgtgcccggcctaatttcttactcttaaaggatttgggctgggcacggtggctcatgcctataatcccagcactttgggaggctgaggcgggcgaatcacgaggtcagtagttcaagaccagaccagcctgaccaatatggtgaaaccccgtctctactaaaaatacaaaaattagcctggcgtggtggtgcacgcctgtaatcccagctactcgggaggtcgagggagtagaatcgcttgaatccgggaggcagaggttgcagtgagccgagatcccgccactgcactccagcctgggtgacagagtgagactccgtctcaaaaaaaaaaaaaaaaaaaaatcagtttcggtcttgcagcccatctccccagcctgtctggaatgtgggatggaagtttatttgtcatggcagtgtcagacggtccagtttcagtttggtgttaaggaacaacagcagcacccacaacaccaacgtgacagctgccacaacacagctttgggccactgctcctctggaaccctggggcaccagggagctgaagtccatgcatgcaacacgcagggtgtggctgcagcttccccaggaagagarctgcatgtataaatccactcctcagtagggaggctggctgtcacttctcttgtttggacagatgtgggggaatttggtcacttgtagtaagtttgccaccaagctcaaggtttctaccgtgggacaacagttccaaaatgctgggcaggcaatggttctgggtgctgcagtgataaatttaaggaattcatgggcaggaactgactcacattgagacatttagcaagacgcttatttatttttcagtttcccttcagtatttacagccctgtcagggcctactttttaacaccaaacacttgctaacttctcagcaataaagaaaggaggggccaggtgcggcggctcatgcctctaatcccagcactttgggaggccgaggcggctggatcactttaggtcaggtgtttgagaccagcctggccaacatggtgaaacgccgtctctactaaaaatacaaaagttagctgggcgtggtggtgcacacctgtaatcccagctgcttgggtggctgaggcacaagaattgcttgaacccaggaggcggaggttgcagtgagctgagatcgcgccactgcactccagcctgggcgacagcaagactgcgtctcaaaaaaagaaaaaaaaaagtaaaggaggaggagcaacagcagggtaggcttctggctcagaggcactgccagctgcagcagccagctggagtggagtaacacactttgcttttcattgtgctggttttgttatttatcttctgtttatggcaagtgatactggtttctagttatggtaatggcatgaagttatcttttttttttttttttgagacagtgttttgctctgtcccctagactgcagtacagtggcatgatcagggctcactgcagcctcgacttcccgggctcaagcaatccttcgtccttagccccccaagtagctgagactataggcatgtccaccatgcctggctawttatttttgaattttagtagagatgaggtctcaccgtgttgctcgggctggtctccaactcctgaactcaagctgttttcctgcctcggcctctcaaagtgttgggatgacaggtgtgagccatgcctggccagaggctatcatttaaaatacatttatgtaaatggagtgaatccattttaaacaaatagtttatatataaaacctagagcaggagttctcaactgggcacaagtggcgttttgggctggatacttctctgttgtggaggttgtctgtgcattgtaaggtgtctcgcagcatccttggctgcctccatccactagatgagagtagcatcttggagttgtgacagacaacaktgtttccagatattgccagatacccaccctgggggtgcaaaattgcctgtagttgagaaccactgatgtaaggtgatcaaatttagacaaaattgtgtaggtagaagctagaggtatttggagatcatagaaatcccatgtgtgtatgaaaatggctgaagtttgggaaactctgttcaggcgagtttccctccattgtgaggtccacttccttttttatttttatttttattttttgagacggagttttgctcttattgtccaggctagagtgcaatggtgtgatctcggctcactgcaacctcagcctcccaggttcaagcgattgtcctgtgtcagccccctgagtagctgagattacaggcatgcgccaccacgcctggctaattttgtatttttagtagagatggggtttctccatgttggtcagatggtctcgatcccctgacctcgtgatccgcctgcctcggcctcccaaagtactgggattacaggcgtgagccaccgcgcctggcctgtgagctccacttactaatgttcgtgtgtgcttcctttgccattgacatcagttcaagagtaaggtggaaggaggtgtcttgaaagggatgctctccagcagtgttgcccagtagaactytcagccatgatggaatgttctgtgtctgcacagtctagtccgtagttagtggtcacatgtagctatggagcactcagtgtggccagggaaaaggaatttttaatttttaattaattaattaaaatttatttttaattaattaaattaaaatttaattttaattaattgaaacttaaaatagccacatgtggtagaagccgccaaggtggacagcacaactgtaaagaagtcagagcagtgaggacaggatgataaaatgcaggctttaaggtgtagactgtactctttaaacattagaattggggccgggtattgtggctcacatctgtaatcccagcactttgagaggctgaactgggaggattgcttgagaccaggagttggagaccagcctgggcaacatagtgagactgtctttactaaaaataaaaaataaaaaaaattatccgggagtggtggtacacacctgtagtcccagccacgtgggaggctgaggcaggaggatcacttgagcctggggaaaaggaggctgcgctgagccatgatggtgccaccacagtcctgcctgggtgacagaatgagaccttgtctcaaaaaacaaaaacaacaacacaaaacccattagaattcaagacacataaaaccaacaggaatgtgtctttacacatggmccagccgtgtggcagacagaaatctttttatttgttwatttttttgagacagggttttgctcttggtgcccaggctggagtgcagtggcgtaatcttggctcactgcaatctccgcctcctgggttcaagcgattcttctgcctcagtctccagggtagctgggattacaggtgcccaccaccacgcctggctaattttttttttttttgagatggagtctcactcttgttgcccatgctggagtacaatggcatgatcttggcttaccacaacctctgtctcctgggttcaagcaattctcctgcctcagccttccaagtagtttgaattacaggcatgcgccaccacgcccatctaattttgtatttttagtagagacggggtttcctcatgttggttaggctggtcttgaactcccgacctcaggtgatccacctgccttggcctcccaaagtgctgggattacaggtgtgagccactgtgcccagcctaattttttgtattttttgtagagacggggtttcactatgttggtcaggctggtcttgaactcctgacctcaggtaatccacccgccttgacctcccaaagtgctgggaatacaggtgtgagccaccgcgcctggcctgccagacaggaatcttaaaagattttagatagtggctgacagactcccaactaaaattggtttgtgttggctggggcgtggtggctcatacctgtaaccccagcactttgggaggctgaggtgggcagatcgcttgagcccaggagtttgagaccaacctgggctatgtagggagacccctgactctacaaaaaattataaaatatgccaggtgtggtggtgcatgcctgtagtcccagctactcgggaggctgaggtgggaggattgcttgagtccaggaggttgaggctccagagagctatgatctcgccactgcactgcagcctgggtaacagagtgagaccctgtctctaaataaataaataacagtgaaacaaagtaaactggcttgagcaaagtaaagtacaacaaaagctattttattgactctgagactgaaagtccaggggtgggtgaatctttgcagtctctcaaggctatcgggaacttcttgtctctgctgtcctccttgggggcttcattttcaggccgactagtccctcaatgggaacaggaygtctgtcccctgcccaggcatgttttctgctaccttagcaaccccagggagaagaacacatctttccaagtatttctagcaaaatcccagccaggggtctcactgtcccttctcaagcctgtcaccatgtccagaacatccagggctctccctggctaagcctggagcctgygcacatcatgcctgaaattcagagatgggattgggctcagctaaacccctgggaaagaagatggaggaaattgacttttacaaccatgattaaagagtgagtgtaggtgaggtcaggagatcgagaccatcctggctaacaaggtgaaaccctgtctctgctaaaaaaaacacaaaaaattagccgggcatggtggcgggtgcctgtagtcccagctactcgggaggctgagggaggagaatggcgtgaacctgggaggcagagcttgcagtgagccgagattgtgtcacctgcactccagcctgggcgacagagcaagactccatctcaaaaaaaaaaaaaaaaaaagagtgagtgtaggatagaagaaaactctatggcagtctaggactgagggagtagacctaagaaaggacgtacttggaaggggaccctctctggggccagggttcagacctggttggggacaatggggtccagactgttggatggcaagaaagttggcgggcttgcagggccagaactggtctgcacccatggggaaagggggaggcaaccttccaagtgcaggtggggctggtgagtcatagctggtggttcacacgcgtccctccagagtgttgctctgtcacccagggtggagtacagtggtgtgatctcagctcactgcaacctccgcctcccaggttcaagcgattctcttgtctcagcctcctgaataggtgggactcaggcctacaggcacctgccaccacgcctggtkaatttttgtagttttagtggaggcggggtttctccgtgttgtccaggctggtctcgaactcctacctcaagtgatctacccgccttggcctcccaaagtgctgggattacaggcgtgagccaccgcgcccagcctccctccagcattctctactgagaaagcttaacactggagcactgtaaaggagagaggcatacactttgttttttatttatttatttttttgagacagagtcttgctctgtcgcccagactgtagtgcagtggtgtgatctctgctcactgcaacctccgcctcccaggttcaagagattctcctgcgtcaatcctcccgagtacctgggactacaggtgtgtcatgcgccaccatgcccagctaacttttgtatttttagtagagacagggtttcaccacgttggcaaggctggtcgtgaactcctgacytcaggtgatctgctcgcctcggcctcccaaagtactgggattacaggcgtgagtcactgcgcctggccgagaggcatacactttcgatggagcttgtgctgccctacttgccccaatctatatgcagttcaatttgcttactttttaaaaaattttttaggccaggcaccatggcttgcgcctgtaatcccggtactttgggaggtcacgggtgggtggatcacctgaggtcaggaattcgagaccagcctgaccaacatggtgaaaccctgtctgtactaaacatacaaaaaattagccgggcgtggtgttgggttcctgtaatcccagctacttgggaggctgaggcaggagaatcgcttgaacccaggaggtggaggttgcagtgggccaagatcacaccactgcactccagcctgggcaacagagagagactctgtctcaaaaaaaaaaaaaaaaatgttttagaggctgagtcttgctatgttgcccaagttggattcraaatcctgggctcaagtgatcctcccacttcagtctcctaagaatctgggattatagatacttaggatatagagtatagcatatagataggatatagatctgcgccaccacacctggctctttcgcttacttattttacctgcctgtcccgtggaggtgtttggttttgtatcccgtagtatgagtccttgaagcatacaagttcaaaagtttaggaccacagtacctctgcttagttttttgcttagttaatatcatctttaaaatcaatattgaaaagtgtaatacatgttcataagaaattaaaatatgcagaagtgggtacagcaaaaagtacaagtcaagtgactttattcatccaacaattctcttttttcactccccagcaataatactgtgagtagtatcttttgtattctttttctgtgaatacrcttcttagtccaactggggttacktacttttggtaaggctgaatgtatatatattgggccccacacgtgtgcaaagagtgacatggtagattagtaatctgtgtaattagcaaaggaaataattcataagggagagaggcataaaggaaatctgtccattgtggcagagcaggtattcaagggtgatgttggcactgagagggagtaaattgataagtggctcaaaggtgaatgggtacggggcaagagagctcctgcatggaccgaacagtcactcttgatggtccccaaagacgcttccaatttrtgaactgagagactgggaaaaaaagtattgctgtgaaagaattgtgcaggtgaggctgttcatggtagtgcaggatgcagagagctcttagcccagggtctggatcagacaggcctgggctccattcctgcttcyacccsttagtaggagagagagcggatgtagcagatgattttgggcaggtcactgagtcctctggggctcactttatccactgtaacaatgggaatggtgctagtaccttgtaggattgttgtgaacattaaatgagacagtgcatttctttttcatttttgacattttagagattgtgcatttctacatctataacatatcgagagtctgtaccctagtaccctactcctcactcccccactgccaccccccttagtctggactgctctatagtcttgcctggatgatggcaccagcctcataaataattcctgtttctgttttttttgttgttgttaatataacagtttcattgagacataactcayataccttataattcacctatttaaagtgtacaattcagcaagttttagtgtatttgtagagttgtgtagctatcactacaatgtgagggccaggcgcggtggctcccgcctgtaatcccagctctcagggaagcaagagtcaggaggatagcttgagcccaggagttcgagacctgcctgggcaatatagcgagaccycgttctccagaaaaaggaaaaaaaaaacaaaaacaaaagacaaaaaaaaaaataagagtaactacaatgtgagaacatttcattcccataaaaagaaaccctatacccattatctgcttcagctcttgctcactgcagtgttttctctgaccagtggcctgggggaccttttaaaactataaatgagatcattccactctcctgcttataaccttcaaatgatccacactgtgtatggagtaacatctagactccttgccctggtgacaaagccctgtgttgtccgccccccatctcctccctccttgtcctttatcttctccccgtgatgggtgcatttctgctgcagccagtctttgcatgctttgcgagtgccaggctgcctcccacctccggatctttgmctgtgcagttccatctgcctggattgcacttccttgtatgggtgcatggcagcttcttcttggcactcagctaaactgtcccctcacctccctggccacccattcccggagccacaccccttcctcattcactctctggcccctggccttattttctttggaagttgtttactgtctccctccactaggctacaaggtccatgggaggaggrccttgtctgtcctgttcgctactgaatgcccggtgcctaggcgagggctggccactgtgcaaacactcagggcacactttgggaatggaggagtgacaaaaaggaagctgctattacttgccttgttgttgttactaagtgttcagtatctattgacttgaaagtcaaataagtcctgtattaaaaggtgtaagttatattcagtgcaggtgaagactgaatgaatgtggtaacaatcaaattggttaaatgagatgggcttttggctcaggtaacacaaagttcttattttatcctgtgccaaacactccagttttgcaatgagattgtgaggaaggagaaggcaaggattctgttccaatgtttggtcccagaggacctagaatagtactttgtaccgggtaagcrcttaataaaataatgcttactcttatgaatttagctgcagaaacatttagtcccatagacaatatgtgtagaatgtaaaaaatgcaaatcttactaaaagaatatacaggaaaagttctccctactccttcttcctgaaagggagccagtgttattagctcgtcrtggagattgtctgtgctcatgcaagcrtctccctgcatgtatgtcctcttgctttcgtgcaaagaatagcatcctacacacaccttttagccccttgcttttcggttttgtgtattttgcagattgggtcattttgtgcacacagcgctattttattcttttttttgtttgtttccccctgcctcaggcttatttgtacaaatagcacaggaagataccaaccccatgcagacggcagcccagaggtcataccaatccttctgtcctcatgtttgcagatggagatctctactctgaagccttttaggggcgtgggcacttttgagagcctgagctggaactgaagctggagctgcagtctrggccttggtttgattcttggcctttggccagcacagcctaagacccttagcagtgcgggcatgagcatgcgtcccaagtttggagtgggcaatgtaggcaagtcgatgaattttgctgccgacaccctttgagatcttgggcttaacctctttggactttacaagggtcttgatagcctcggcgtgtgcactcagggccttggtggtgttggcctgcatcttcttcatgcacttcttcttgtacttcttggcaaagtgcatgttcctcaggaacttggggttcacccacttaagaaagtcatatctttgtgactgggatttcttcctttctttctttctttcttttttaaatttcttcttaaaaaaaccaaaatgggatacacgtggactgggatttcttgatgccatttctgttccattttcgggcctggttgtgtgtggttgtatgtggacttggacatgtctgcaccgaacccacagctcccgaagtgcctggaaccggaagaggaccttatgctttagagggggttaggaatttcatttatggcttatccctgtttatttaaccagtcttcctttgatgaacggtgttatggtctgaatgtatcccttctccctaaatctgatagttgtatgaagttgggcactgaggaggtgattgggtcatgaaggcagaatcctcatgaattcccttataaaagaggcaggaggggctgagtggggtggctcacacctgtaatcccaacactttggaagatgaggtgggcagatcacttgagcccaggaatttgagaccagcctgggctgcatggtgaaaccccatctctacaaaaaaaaaattacaaaaattagccaggtgtgattgtgcttgcctatagtcccagctacttgggaggctgagaggtgggaggattggttgagcttggaaggttgaggctgcaacaagctgagatcatgccactacactccatcctgggcgacagagtgagaccccatcttaagaaaagaaaaaggcatgaggggccaggcatggtggcacaacttgtaaccccaccactttgggaggcaaaggtgggaggatggcttgaggccaggtgtttgagaccaccctggacaccatagtgagaccctcactctacaaaatattaaaaaattagccaggcatggtggcacatgcctttagtcccatatacttgggaggctaaggtaagaggattgcttcagcccaggagtttgaggctgcagtgagctgtgattgtaccactgtacaccagcctgggtaatacagattttttaattaaaaaaaaaattaaaaaaaaaaaggccaggtacagtggctcacgcctgtaatcccagcactttgggaggccaaggcaggcggatcacgaggtcaggagttcaagaccagtctgaccaacatggtgaaaccccgtctctacttaaaaatacaaaaattagctgggtgtggtggcgcacgcctgtaakcccagctactcaggaggctaaggcaggagaatggcttgaacccagtaggtggaggttgcagtgagtggagatcgtgccactgctctctagcctgggcaacagaattagactctgtctggaaaaaaaaaaaggcatgaggaatgggcctcaccagatactgaatctattggtgtctccatcttggactttgcagcctccagaactatgagcaatacatttccttgtttgtaaattacatagtctaaggtattttgttatagtagcgggaagggactgaaacaaatggttagatttgtttccaatctcttgctcccatagtgcagtgagtgacctgtactttgtgcatatgcacaaaggtgataggctaagtaattaataaatagcataactgtaaccggatagcttgatgtctggaaacttctgctaaaacaaaacagaacaaaaattttgtataaacagtcaacctgacagtttgtgattctcttaaattcatttttcatctttcattagaactgtacaactatgaagacagtcattactagattattataggatagggagagaattactggctcttagaggagtcagtcttcaccatccagtaaggtttctgcaaatacggtgatgcgctttctgtcaaatgaatcttccttcgctcctctcctccttcccctttttctcccatccttttcctctccccctccctctttgcttcctccattcattcaaaatgtattcagtgagtgtccactgatggccagcatgggtgatttgcacttggaaacaggagtggcgagagtggttggactccttgaggcttctgtgtgtgtctctggcttttggacaacttagaaaggggccaacaagaatgagttactagaagtgaaaccttagcagagccacactccaccatgaatgctggtttactggaatgaggatgctatttttaagaaagagcattgtgtttcatcatggaaattttgagcatctgagcaggcagcctgctggctcgctcatctttaaggtcctgatggacagaggctgtgttttcttagctctgtaccccagcacccaccaggacctgctctgtgggaacaagggaagaaggaaggtctgtggtggacgagtaatatgtgagttgttggtttcaccttagctggcgacatcccagggggctggcagggctgggaccttgcctcagcctttgagtgctggggcggtgaggtgagcggtccagcgagggacgtttttgttgcagtttttcgggagcttgtacttctcagagtgccttgtttaataaagctctcctgaaggacaagctgccgtttttggggtcctcagagcacctcgttttgccagagcagcccagattcctaggtgttcctttgcctcgtgggagggtgacctgggagtgggggtgctgatgttggcaycaatgagctgtcctcttgggaaaaccacgttgggggcgcccttggggtcgttctgccgacagctggtgtgctggcttctctccaggttatatcgagctctgagacatcatctttgtggcttgctcctctaatgtgttgctgaaaaggaaagctgggggtggagaggagattcccccgctcccccttttcctttatatagcaatcttggtggaactagcagctgtgacagcatggggtggggaaaagacactaggctttggaataaggctgacacagttcaaggccagacccagctgtttcttacgtctctgcaaacttgggtgctttagctgttccaagcttctcttttttttttttggagatggagtctccctctgtcacccaggctggagtgcagtggcatgatcttggctcactgcaacctccgcctcccgagttcaagctattctcctgcctcagcctcccyggtagctgggattataggcgtctgccaccacacccagctaatttttgtaattctagtagagatggggtttcaccatgttggccaggctggtcttgaactcctgacctcaggtacctccgcctgcctcggcctcccaaagtgctgggattacaggcgtgagccacctcgcctggcccaagcttctctcttatctgtgaagcatagatgtaataatagtacttactgtgatatatttattttcttaaatccttttattctaaaataaagcctacctttaaaaaattattattatwtttatttatttatttatttgagacggagtctygctctgttgcccaggctggagtgcagtggcaatagctcactgcaacctccgcctactgggttcaagcgattctcctgcctcagcctcccgagtagctgggattataggcgcctgccaccatgcctggctaatttttgtatcttcagcagagacggggtttcaccatcttggtcaggctgatctcgaactcctgacctcatgatccgcctgcctcggcctcccaaagtgctgggattacaggcatgagccaccgtgcctggctaaaaaatttaatttttaatagagatgagagtctcactttgttgcccaggctggtgtcaatctcctggccccaaatgatcttcttgctttggcctcccaaagtgttgggattataggcataaaccaccatggctggccgaatcttactttttggaacacagtcttttgccacataatgacatatcaaccaaccacagaccacatatataacagtggccccattagattagaatactgtatttttactgtattttttctatatgtagatatgtttagagacacaagtacttaccattgtgctaccactgcctgtcttattcagtacagtctcatgctgtgcaggtttgtagctgaggaataataggctgtaccattcagcctagtgcatagcaggtgatggcagccaggttgtgtaagtcactctagaatgttcccacagtgccgaaatggcctaatgcgtttcttagagcgtatccttgtcgcttaacaatgcaagactgtaaataatttgggattggggacaaagcatctttttatttatttatttacttattttttgagacgaagtctcagtctttygccaggctggagtgcagtggtgcgatcttggctcactgcgacctccgcctcttggtttcaagcgattatcctccctcagcctcctgagtagctgggattacaggcacgtgccaacacgcccggctaatttttgtattttttagtacagacgagatttcaccatgtcagccaggatggtctcgatctcttgaccttgtggtctgcccacctcggcctcccaaagtgctgggattacaggtgtgagccaccgcgcctggccaggacaaagcatcttttatttggaccacagcttcgtgggagcttctgctctgttttcttgtttcactgaaagatgaagcctsaaatatggctgtggtcctgagccagagaagatgctgtagagaaaagcaatmtgcgaagagtgggcagacatgagcacagcctcgatgcgtgggcgtggccttgatrcgtgggtttctttcccacaggtgctgcgagtggctgagatgctgcggtggaggggaggccaggccccgcactgtctggctggggcaccccgagaagagagaccagaggtatcctcggaatgtcatcaacaatcagaagtacaatttcttcacctttcttcctggggtacgtgcaggcagggacygtgctcttttcttttttccatcacaaatacatgcattggtacagatgttatgtcatgtcatgttattttttagacagagtcttactctgtcgcccaggctggagtgcagtggcgcaatcttggctcamtgcaacctcygcctcctgagttcaagcgattctcctgcctcatcctcctgagtagctgggattataggcatgtgccaccacgcgtggctaatttttgtatttttagtagagatggggtttcaccatgttggccaggcyggtcttgaactcctgacatcaggtgatccacccacttcagcctctcaaagtgctgggattacagatgtgagccaccttgcccgccggtacagtcttaaaagactgagttccctgtggcagatgtcagtgacttttctgtgccaccttagtccctggttgttcatcttccctgggttcagcactgggtagtggcggggttggaggtggggtggggtggagggggcacctgccttctctctgcaaggctgtgaccccacctgctcagttagagtaacttcacatgtatttggtgtgctaagcctaagaatgaaaaagacattctggggacctagcattatgaccaaaacagcagaaaaraatgtcagcagtgcttaaatttccccccatcatgacacatgtagtcaatattggcaagttgggagataatagcttagaggagaaaaaataaagatgcattttaatcttaccatctatagagagaattttcattartatttttgctaataataaatgtttctggtggcataacacttccacattaacttacacaaatctgtggacatgtactcagcaaaccttctccccaacatgcacataaattaaatatctatttttatscagcactgcctccaaacacacaccagttgactttgagaagcagcagtagcaatcagctccaatgcagaaaggaacataatggtagtgttagatattgagtgatagtgcagaggcacaaatctattatatagtcgagttcaaggtcaattggaatttgttttttaagagaccagatctcactgtcttgcctgggctggagtgcagtggcatgatcagagcttattgcagcctcagactcctgggctcaagccatgctcctctctcagcctcccaaacagaaatttgaatttttttttttttttttttgagatggagtctcgctctgtcgcccaggctggagcacagtgagccatcttggctcactgcaacctccgcctcctgggttcaagcaattctcctgcctcagcctcccaagtagctaggatcacaggcacccgccaccacgcccggctaattttttgtatttttagtagagacggagtttcaccatgttggccaggctggtctcgaactcctgacctcaggtgatccacccaccttggcctcccaaagtgctgggattataggcacgagccagcgctcccagccgtgaatgtttttaagggtgattttgactatattcattgctggtttcctcaactccccccaactctcagtacctcaagtgaggaataggtttattctcattcatggaaagtctgatgcagactgggccacactcctccatttcctgggtatggcacctggactatgtggccaccaaagtcaccagagtggctcaagaggcaccaatggttcttagctgccttagcctcaacgagacacagtacgtccattcattacctattggcccaaactagtcatgtggtctcagtctgactctcgggtgcatgccaatggtcagaaccacactrgcacctagctgctccccaggggaggatttgactgtgttattttatggagttgaggtcatgttgtggacatagcttttttttttttttgagactgagtctccctctgttgcccaggctggtgcacaatggcgtgrtctcggctcactgcaacctccacctcccgggtttaagtgattctcctgcctcagcctcctgagtagctgggattacaggcacgtgctcccatgtccggctactttttttattttttagtagagacagggtttcatcatgttggccaggctggtcttgaactcctgacctcgtgattcatccgcctcggcttcccaaattgctgggattacaggcgtgagccactgtgtgcggccatttaactttttaaaaattattttttattttattttttgagatggggtttcactttttattttttgaggtgggggactcaytgtcacccaggcgagagtgcagtgacatgatcttggctcactactatctccgcctcctgggctcaattgatcctcccacttcagcctcctgagtagctgggactacgggtgcatgccaccactcttggctaatatttgtattttttgtagtgatggggttttaccatgttgccatggctggtctcgaactcttgagctcaagccatttgccaacctcgccctcccaaagtgctgggattacaggcatgtaccaccacgtctggacatgctgtggacgtaactttttttttttttgagatggagttttgctctgtcacccaggctggagtgtagtggcgcgatctcagctcactgcaacgtctgcctcttgtgttcaagcgattctcttgcctcaacctcctgagtagcctataggygcctggctaattttttgtatttttgtagagacggggtttcaccttgttgggcaggatggtcttgatatccttacctcgtgatccgcctgcctcagcctcccaaagtgctgggattacaggtgtgagcctctgcgcctggctggacataactttttatttctttttgcactcaaccttatagcataagcattttccgcaaaaacctcctcctaaacaacagagcaaggctccgtctcaaaaaaaaaaaaaaaaaaaaaaaaaagaaataacacagtctggacgcagtggcttaggtctgtaatcccaacactttgggaggctgaagtgggaggatcgcttgagcccaggagttcaaggccagcctgggcaacatagggagaccctgtctctacaaatagcaaaaaatttagctgggcatggtggtgcatgcttgtggtttcagctacttgggaggctgtgacaggaggatcgcctgagcccaggaattcgaggctgcagtgagctacgatcacgccactggactccaggctgggtgacagagcgagacctggtctcaaaaaacaaaaccaaaccccaaaacacacataacatagttgatgcccctgtgtgcccctccatgttagattttaccccttccccaggaagtaactactcttctgaatttggtatttacaatttccatgtatatcattatttactctttcttttacaaatgatacttttattacccatgtatgtttttctaaacaacatatggaagtgtttaagctctatgtgaaaagtatagtgtaaattgtattataaagcaggatttttttttttttttttttttttttttgagacagagtttcgctcttgttgcccaggttggagtgcaatggtgcgatcttggctcactgcaacttcctcctcccgggttcaagcaattctcctgcttcagcctcctgagtagctgggattataggtgcctgccaccacgcctggctaatttttgtagttttagtagagacagggtttcgccatgttggtcaggctggtctcgaatcctgacctcaggtgatccgctcgcctcggcctcccaaagttctgggattataggcgtgaaccaccacgcctggctgcaggaatgtttttaratgttattcatttcccaccaaatgttccagatctcatcagacaagccctgaatgtctttctctgttgtctccctccattccaggtgctgttcaaccagttcaaatactttttcaacctctatttcttacttcttgcctgctctcagtttgttcccgaaatgagacttggtgcactctatacctactgggttcccctggtaagttaatcggcattgtttgttcagtaaccttagaggtttggaaacagaaagttctttgtttctctcactnaggcatctggaatgggatggtggccttgtaagggaaaggatgcccttaggccaatacattgggagtctctgagactttaacgttgaagctccatttcatataccgcctggatcaaactatagcaaagcctgtgccgttcatttattcatttagctgttgggtcttgcattatctcaacaaggatttattgtatgtttattgtatatggcacaagtctagactctgggaacacagaggtaaatgagaaagacaaatcccctgtcctcatggattatatcacaggttgagcatcccaaatccaaaatctcaaatggtctaaaatctggccaggcacggtggctcatgcctgtagtcctagcactttgggaggccgaggtgggaggattrcctgaggccaggagtttgagaccagcctgggcaacatggtgaaacccatctctactaaaaatataaaaattagtggggtgtggtgggacgtgcctgtagtcccaactacttgtgaggctgaggcaggagaatcgcttgaacctgagaggcagaggttgcagtaagttgacatcacgccactgcactccagcctgggtgatggagagagacctgtctcaaaacaaaaacaaaaacaaacaaaaaaattccaaataaataaatgtaaaatctaaaacttttgagcactaacatgggactcaaacgaaatgctcactggagcattttggatttcagatttttggatttgagatgcttaactggtaaggatggcacagatgtcccccaatctggaaacatctgcaatctcaaacacttcggctcccaagcattctgcatcagggatgctcaccttgtatttgaattgtttcctgggatcacattttcttttyaaccaatgtagagtatttgagtgtgaggggttggaaaartagcagaatctatgcttttgtgcatgcgatgtgtagcagaaccgagtagcccctctgttccttccctcgcctccttttctttctccattgatttggcagatggtggttgagcacctgctgtgtgccaggccctgtgctgggttctgggggtgcagcaatgaacagagtagacaaatatttctgccctgtggkgytgacattcasaagggatagacaataaaccagtaaatgaaattgttacaaattgtgaaaagtgctctgaaggtaacagaataaggtcgtaggacagatggggtatcccagatacatttagtattttttacatgaatgaaggtgaagggtaggagatgtgaaggggcagccttagcctgtgtggctgtgaaaggcctcctgaggagtgatgggaaggagactattccagggggcagtgatgcaaaggccctgcagcaggcatgtgcttagagcatttgagaaacagaaagaggtccaatgtaactgagctatggagagggcagaatagatacccttttttctccaaactgaggtattatgaaatgcagttgctgtttatattctcaacaagtgggacccagggggggaacgcttggattctctgttcataaatctcattaacgtttttatttttatttatttatttttgagatggagtttcgctcttattgcccaggttggagtgcagtggcgcaatttcagctcaccacaacctctgcctcctgggtccaagcgattcttctgcctcagcctcccgagtagctgggattacaggtgcccgccactgtgcccagctaattttttgtatttttagtagagatgggtttcactctgttggccaggctggtctcaaacgactgacctcaggcgatccacccacctcggcctccgaaagtgctgggattataggcgtgagacactgcacctggctctatttttatttttaattaaagaatttgcttttaggccgggcacggtggctcacacctgtaattccagcattttgagaggctgagatgggcggatcaagaggtcaagagatcaagaccatcctggccaacatggtgaaaccctgtctctattaaaaatacaaaaattagctgggcttggtggcatgcacctgtagtcccagctactcaggagactgaggcaggagaatcgcttgaatccrggaggcggaggtggcagtgagcgccactgtactccagcctggtcaacagagcgagactccgtctcaaaaaaaaaaaaaaaargaatttgctgttgcccaggctgtagtgcagtgtgcaatcatagctcactgcagccttgaattcctatgctraaggaatcctcctgccccagccccctgtgtggctgggactacaggcacatgccaccatgcctggataattttttttttaattcattttttttcctataggttattggggtacaggtggtatgttgttacatgagtaagttctttagtggtgatttgtgagattttggcacactcatcacccgagcagtatacactgcaccctatttgttatgttttatcccttgcctccctccccactcttttccccaagtccccaaagtccattgcatcattcttatgcctttgtgtcctcatagcttagctcccacatattagtgaaaacatatgatgtttggttttccattcctgagttacttcacttcgaataatagtctccagtctcatccaggtcactgcaaatgctgttaattcattcctttttatgggtgaggagtagtccattgaatatatataccacagtttatttatccactcgtcgattgatgggcatcartctctactaaaaatacaaaaaattagctgggcatggtggcgggcgtctgtaatcccagctactggggttggttccacgattttgcaattgtgaattgtgccactataaacgtgtgtgcaagtatctttttcgtataatgacttcttttcctcagggtagaacccagtagtgggattggtggatcaatggtagttcttctttcagttctttaaggaatctccacactgttttccatagtggttgtatttacattcccaccagcagtgtagaagtgttccctgttcactgcatacacgccaacatctactgttttttgatttttagattatggccattcttgcaggagtaaggtggtatcgcattgtggtttcgatttgcatttccctgatcattagtgatgttgatcattttttcatatgtttgttggccatttgtgtatcttcttttgaaaattgtctattcawgtccttagtccacttattgatgggattgtttgtttttttcttactgatttgtttgagttctttgtagattctggatgttagtcctttgtcagacgtatagattgtgaagattttctcccactctgtgggttgtctgtttactctgctgactgttcctcttgccgtgtaaaasctcttcagtttagttaagtcccaactatttatctttgtttttattgcatttgcttttgggttcttggtcatgaaatccttgcctaagccaatgtctagaagggtttttccaatgttaycttctagaayttttatagtttcaggacttagatttaagtccttaatccatcttgagttgattttttgtataagatgagagatgaggatccagtttcattctcctacatgtggctagccagttatcccagcaccatttgttgaaaagggtgtcctttcccccactttacgtttttgtttgttttgttgaagagcagtcggctgtaagtatttgggtttatttctgggttctctattctgttccattgatctatgtgcctatttttataccagtaccatgctgttttggtgactatggccttatagtagagcttgaaatcaggtagtgtgatacctccagatttgttctttttgcttagtcttgctttcactatgcaggctcttttttggttccatatgaattttagaattgttttttcttttttctttttctttttttttttttttgagatggagtcttgctctgtcacccaggctggagtgcagtggtgtgatcgtggctcactgtaagctccgcctcccaggttcatgccattctcctgcctcagcctcccgagtagctgggactacaggcgcctgccaccacgcctggctaatttttttgtatttttagtagagagggggtttcacctgtgttagccaggatggtctcgatctcctgacctcgtgatccacccaccttggcctcccaaagtgctgggattacaagcatgagccactgcgcctggcccaagaattgttttttctaattctgtgaagaacgatgctcttggctaattttaaagctttgtgtagagacaggatctcattatgtggcacatactcatctccaactcctgggctcaggaatccacctaccttggccttccaaggtgctaggattacagatatgagccgacacgcccaacttattaaatttttttgactaagagaaagttgtaaacataaaaaagatttaggctctccttaaagaaacaaaaacaataaacctttttgctgttggcagtaggtgagggatgataaggatttggtgtagacgtgcttgtggagtggaggaagccagatgctcagggaccagggagtgggcgtgcatacgccgtacgtgccatgttatcagacaagtgatgccagcagctcttgccctgagaagaggaagggaggtcatttcttccacacaaacaatgcaggtgcttctgaaatgacgagaatagttcttttctgctctgagtcattttggggtgaagtagcatcctgagagctagagaggccctttatccaagcatccctycccctctgataacagacattcctgcctgtatcaggtggcatgcttaaccaactgccaggtggtgcctgcgcctttaagcactgatattgtgatcatcaggaaacggtttttgtttttgttttttgtgagacagagtctcgctgtgtcgcctagrttggagtgcaatggcgcgatatcggctcactgtagccatcacctcccgggttcaaacgattctcatgcctcagcctcctcagtaactgggattacaggcagccactaccacacccggctaatttttgtatttttagtagagacgaggtttcaccatggtggccacgctgctatcaaactcctgacctcaagtgatccgtccaccttgacctcccaaagctgggatgacaggtgtgagccactgcgctaggcctaggaaactgttgggctttaccttataaactgagatgccctagagctgggctgatgcagtaaagccctgggagaatgagaagctcctgtcggctactctgcccagtcaggtacaaacagggaccaggagttgccagacccaagagttacaaactctatagttttatgtgaaatactctaacttcattttagttttttagttccataactgtttactrtatacttacataaaaatcaaaccataagttactttaacaaagttggtctacaatgtatataaaataacatttatcatactgccttttattggttatctttttaaagtgtagttatttgaaaggtagtacattcacatgactcaagaaatatacaaatgttccttttgaagaatctacttccatccagttttgcaatactttcatttcttgtccttccctccagagttgcttatgaacaaagtacaatgaataaaaattcttacaactttctttttattgattgattcattgagagtctcactcactgtcacccaggctggagtgcagtggcatgatctgggctaactgcaacctctgcctctcgggttcaagtgattctcctgcctcagtctcctgagtaactgggattacaggtgtgtgccatcacgcccagttaatttttgtatttttagtagagatgggggtttcaccatttttggccaggctggtctcgaactcctgaccttaagtgatcctctcgccttggcctcccaaagtattgggattataggcgtgagccactgtgcccagcccgtttcttcttcccccccttttkttttttttttgagacagagtcttgatctgttgccaggctggagtgcagtggtgcgatcttggctcactgcaacctctgcctcctgggttcaagcgattctccggcctcagcctcccaagtagctgggactacaggtgcgtgccaccacgcccagctaatttttgtatttttagtagagacggggtttcaccatgttggccaggatggtcttgatctcttgacctcttgatccgcccatcttggcctcccaaagtgctgggattacaggcgtgagccactgcgcctggcccatgtttcttctttttaggaaaaaaataagatacacatagtttttaatcatttttaaaaatttttagtattttttctcttgatttttaaacatcaacaactcattaataacaatttaaagcagtatgtgaattggacccatcccttttcctcgtggtctgtatgttcaggctgtcccttgtcctctctgctcttgttgaaggtgagggactttcatattacctcacccctgtgcttctgggctcaggaggcccttccctggcccccagcaaggaatgckccagaccccatctctcaagccacatctctctctcttttttttttttgagacagagtctcactctgtcgcccaggctggaatgcagtggctcgatcttggctcgctgcatcctccacctcccgggttcaagcgattctcctgccgcagcctcttgagtagctgggactacaggcgcgcaccaccacgcccagctaatttttgtgtttttagtagagatggggtttcatcatgttggtcaggctggtctcgaactcctgacctcgtgatccacctgccttggcctcccaaagtgctgggattacaggtatgagctactgcacccggcctgtttttttttttttttttttttttttttttttgagatggagtcttgctctgttgcccaggctggaatgcagtggtgcgatctcggctcactgcaacctccgcttcccaggctcaagtgattctcctgcctccacatccccagtagctgggattacagatgtgggccaccacacctggctaacttttgtagttttagagatggggtttcaccatgttggccaggctggtctcgaactcctggcctcatgtgatccgcccaccttggcctcccaaagtgctgggattacaggtgtgagcgctcgactcaagccacatcttttgaattatcttaaaagccagatcctgccattctttttgccccccactcctccaaagctgctcctgttcactgttcttttttcaaatagaaaagatcgcatgatattggagaaatatttaaagtaccaaaacaaccaaacaaacaacccccccccacacacacatagggtgatgaaaatcacctgtgtagctactaccctaaaatatcccatttatgattctggtgtgtttccttccagtgccttcttacttatgcatgtattttatgtatactataacttaccttacataaaccatatatattctgcagatgcatgttttatagatttgggatcccaaggtgtcctcgaaggcagccatgtgtctctccgtctccctgccttttatatctcaagcgtgatgtgcagtctggtctctgccgcctccccttatccattgccctggctgcaatgtcttggggtacagacatgagcagccctgcagcctcatttacactatcattggtatgcatgttaggaggagaccttagccatgtttggcatacatttttccttttctttctttcttttttttttttttgagacggagtctctgtcacccaggctggagtgcaatggcgtgatctcagctcactgcagcctccacctcccgggttcaagtgattctcctgcctcagccccctaagtagctgagattacaggcatgcgccaccatgctcggctaagttttgtatttttagtggatacggggtttcaccatgctggccaggctggtctygaactcctgacctcatgatctgcctgccctggcctcccaaagtgctgggattatgggaatgagccaccacactcggcaattatgactttttaaaaatttatttccactgaggccttctctgcccctactcccacctctgctgtctcctgactggcctgttttccctttgactatagcttaggatagaagccaggcaggttaatagcttgtttctaggttttggcacctccagcagttggtctccacgttgtagaccctttttagtcagcttttcctgtgatggctaagttgggggatatttgtcttgtattgttgcctctctttccaacagctacagaaaaaagggtttgtggtgaaaaattagacagcatctacttctaggtgaccatcgctgatttccttaatagatttttatgtagagagtcaattttcagttcttggctagaagacattttgaaacgtcttctagccactctgaaagttgcctcatttcaaacccaactcttaagtgcagcagttctgaatgagggctgtggagccaagtggtttgggtttagatcttttttttttttttttttttttgaggcagtcttgctctgtcacccaggctggagtgcagtggtgagatctcagctcactgtaacttccgcctttcaggttcaagcgattctcctgcctcagccacccgaggagctgggattacaggtggccaccacacccagctaatttttgtacttttaataggggtgggggtttcaccatgttggctaggctgatctsgaactcctgacctcaggtgatccgcccacctcggcctcccgaagtactgggattacaggtgtgagccacgacagctgactctgagaagtcgtgtaatttgaaccaaggctacttttctgagcctcagttttgtcatctgtaaaaaggaatgatcctttctactgccttggtttgttgggaggtttaaatgaattactgcaagtaaaaatgcttcatgtggctgtatagaattctcaggaaacattctgattttaatttttaaattctgccactaatgacatgtttttcattgttaagttttaaattttttgcccctgagacagagtctcattctgtcgcccaggctggagtgtagtggctcaatctctgcttactgcaacaatctctgcctcctgggctcagacaatcctcctgcctcagcctcctgagtaactgggaccatagcacgagccaccatgcccagctattttttttttttttttctgtttcaggtttctattttcttttgtagaaaccagctgattctttttgtagtttttgtaaagatggggtctccctatgttgcccaggctggtctcraactcctgggctcaagcgatcttcccgcctcagcctccccaaatgctgggattataggtgtgagccaccacacccagccatgttttagcttttaataattttttcttggtactaatatgttaggggagaagtaactcaggagagcagaaataatctgtaacattatatgatgaccaaataaatgtggagtatttttgttattgagatataatctatataccataaaatacacagatcttcagttttcagttcattgagttttgacatttgtcagcctccacataaataccacctcaatcaagatatggaacatttccatcaccccaggaagttccccagtgcctgttcctatcaccccacccgcccccaccaccccaggcaactgcttttctgatttctatctcccatagattagctttgctttagtgaatttatttttgaggtacaacttggcaaaagaggcttgcactttcagagttgcttgtctgtgagttgtcactgcctatgattcttcaccagctccaacagctgcctccttcaacagccccccttcccctgcccattaaagcttctttctaaatatctgtgartggatattaaggacctcctaaattggatggttggaatttattcctggactacatttgcatctctttgtaaggcaatttcaccagcctggccaatacggtgaaaccctgtctctagtaaaaatactaaggcatggcgtggcccctaggattaatgagaactgtgtgtgtatatgtgaagggagacgtgataatttaggaggtggtatttatttgcagcagggaggttagtgagcggctcctgtctttgtatgagcacacactttccatgaacatcaatgggatttagccaggcccacgcagagagaaatagaaactggaacattcgaaaaaacaaacaacaacgaaaacttgggttttggcacagaacaacaaaatagcagcatagtggagggggcagccctgcacaccgggtacgtgctcctcacagaacaggttttctctcactccctatgtggtctggttatgctttgattctgaaatgtaccagtttcttttggctgcagtgtgtactttacatctgattggaaacaggagtaatcctttgattgtaaagatgtatgggcattgggaggagtttcacaaagcagcacatctctggatagatttacataagagatttaaagtcctttgaatcgaagttaatatatttcacagggtaaactatgaaagtgaaattctccaagaaccacaactgctaacccttgggtggttatgctgactgtatttaaaaaataactgtcctggcaagctttaaaaggggataggggaaggaatgacaaggaaaacgaatgactgtaaacmagtaagtaaaataaatgaatgattttggctttattgattacaagaggaaaaaaatctagattggaagtagattctgctatgggtgactccctccacccaaccagatattatgagttggggttcccaactcagaggaaagttggggaagtttaaaatttttattagtttctacttatgcaattaatactttaatagagtttccttataaaaacttaaaacagctgggcgcagtggcccatgcctgtaatcccagcattttgggaggctgaggtgggtgaattgcgtgagctcaggagttcaggaccagcctgggcaacatggcaaaaacccatctctgctgggcgtggtggctcacgccggtaatcccagcactttgggaggccgaggcgggtggatcacctgaggtcaggagttcragaccagcctggccaacatggtgaaaccctgtctctagtaaaaatacaaaaattaggtgggcatgtaataccagctactggggaggctgagkcaagagaatcgcttgagcccgggaggcggaggttgcagtgagccgagatggtgccactgcactccatcctgggtaacagagtgagactctgtaacaatgacaacaacaacaacaacaaaccatctctaccaaaaatacaaaaattagccaggcatggtggcgcacacacctgtggtcccagctactccggaggctgaggcaggaggatctcttgagcccrggaggtggagattgcagtgagccaaggtcatgctactgcactcctgcctgggtgacagagygagaccctatctcaaaacaaacaaaaaagccctgtaatcccagcactttgggaggctgaggtgggcggatcacgaggtcaagagatcgagaccatcctggccaatatggtgaaacctcgtctctactaaaaagacaaaaattagctgggcgtggtggtgcgtgcctgtagtcccagctactcgagaggctgagacaggagaatcgcttgaacccgggaggtggaggatgcagtgagccgagatcgagccactgcactccagcctggtgacagagtgagactccaacaaacaaacaaaacaaaaaactgaagacattacagataggctgaagcacctttcagtccctccctatcctaattctagtctccttcccggcagagaaatctaacctgtagttaaggaaattggaaaacatttaattgtatagaatctttgttgctatttatatgaatggggttgcagtgtatgtcctgaaagatggattttttccacttggctctgtgaatgcaatggatgtatcttattctgtttaactgttgcctggtggtccctcttactggctccatccacctaagtttctctagatacagtggcagtaaagattaagatttcctacattgcagttcccatttatcacttagtagctttatgtctttgggcaagattactcagcctctctgtgcctcagtttcctcatctgcatggggatctcagttataggagcatatctcagggttgttatgaggatgaagtgcacttccaatactgcccagcacatggtgggtgagagacagtattagtagtcaccatcgtttgcttgtggagggacagtttgagtattcctgtgtgtgtcaccctcaccctgaggtggtgaatgtggacgtgcttgtgtgtgtgtggcagtgagtgtttctctagggtagtgtttctacaggttgtgtttgggagtgcatgttccctaagacagattcagagagggggcttgcagcggcgtgtgyatttggaataactcacaggtcctgcccccctgccctcccaagtgacctctygcctttcctgcccctggcaccaggaggggacggttggctgcagcagggctcactgcctgtagcaagactcactgtcgtctgtctctgcagggcttcgtgctggccgtcactgtcatccgtgaggcggtggaggagatccgatgctacgtgcgggacaaggaagtcaactcccaggtctacagccggctcacagcacgaggtcagccttctggctcctgggccacagggttgcagctcaatcacgggccgctgacagtcaggggagaagagttcaaggcccgggccgcnggtgtgggaatgccacgtggcggaacagtcgcttggttactccagcaccagggaggcctccatctgccctggatgacaggttgacggggtcccaccaggccctggcagcatccacaggcctcttggtgttggtcttgtcaaataacttatgtgtcataaacctggaattasattttgtgtgctggcatcccagctggctaatccctttcccgttctgccgcctggctgaagagggaagtagggcgcctctgctgttcaaatgagaggctgcaaactgttttcaaagatactcttttggcagtgattaaactgttgctactttagtttttagaaaggcaaccgatttagataaataactgcatccatgaagatttctttgaaggcattttataaatcctggaaattgaggcctgcagagcatggagtctgatccaaaaataaatgaccagttgtgtatgtcagagttatatgtattgggctcaaaaacaaaaaattgaaattttggcccagtacagtggctcacgcctgtaatcccagcactttgggaggccgaggcgggctratcacaaggtccggagatcgagaccatcctggctaacatggtgaaaccctgtctctactaaaaatacaaaaaaaattagccgggcatggtggcgggcgcctgtagtcccagctacttgggaggctgaggcaggagaatggcgtgaacctgggaggcggaggttgcagtgagcatagaccgcgccactgcactccagcctgggcgacagagcgagactccatctcaaaaaaaaaaaaaaaagaccagcctggccaacatggtggaaaccctgtctctgctacaaatacaaaaattagctggacatggttgcattcatctgtaatcccagctactccggaggctgaggcaggagactcacttgaacctgggaggcggaggctgcagtgagccaagatcacgccattgcactccagcctgggtgacgagggaaactccatctcaaaaaaaaaaaaaaaaaaaaaaattgaaattgaaattttaataatatttcccagggatatgaaaaagctttaatcactgacccccccmcttgcaagatatgtgcattttaaatgctagaacttaaaaacccactgaaacacacggtggaaaagccacaaaacaacccagccattgttgatgtctgtgtctgactacaatagatttactgtaaggttgcattcagaaatgagagaatgttacctaaagtttgctaatctggccaaggaaagtctattcgattgtcccctaagatgactgatcccattcagggattaatgctgtttaaagaggtggaggggaataaaggctatgccttgccttcaggaaattgagaatttggaaagagataagatggttagatgccaagggacttagcacctgagccaaggtctgaactgctgtttaagtgctttatgcttccaaggaagcagtccatccatggttccttcggggttttcagtagagttttccttttgggaaaaatgtcaaaggtgtatgttttgggctaaaaaaaaatgcagattttaattatatttcccaagggtatgaaaatactttgttttagggtatttgaatacattgtcgtggttggtggtcttaaaaatatgcacatctctgggagaagggggaatttagagttggtaaagaaatgctttattsatgctaaactactgtatttaggacatgttgctaccaaaagaaaaagaatcagtgtaatctttgcagaggcaggtggcttgggctttctgcgtgagtagtcagaagacccttctggagggctttttttgtgtgtggttcgtgtatattaaatcctcccttaataacatattcttactataacatttaaaacgcttggcaaccaacaaaagccccatcggagagagtgcggtggatctcttcagagctcaagagaagaggccttcggattccattcattcatccatccgggcttcgaccctcctttggttcttttcatattgcaattgcttttcccgtgaatgatttttctgccctccactgcacrccccttcccagctcttgcttcaacttcactcagctcttgagaaagtcctaaggrgaattggcagatggctctagcattaaaaacttgtcttcctttgtgggtctctctttgcggcccctggtgtccattgttatgccratcccactctagggaaaacagaacacagttctgaatattaacccagaccctagcgctgcagtttgttgtgaaagcccagcaaaacactgaagaaactgtcagcttggaaagtgatcgagkcgagttyagttatttgatacgcttttggggggagggccagagtagcaaacctaaactgggagattgcagggaagagggagaaaaagaagccttttttgactttcctgtcgaattccttcataatatttccttgagcaaaaacttcaccatcttcacttagtaagttccaaagcaaaatgaaataagtatgtatgagtatattcatgatggactgttttctttctatcacatgaagtttttttctttttttttagacggagtttcgctcttgttgcccaagctggagtgcaatgtcgcgatcttcgctygctgcaacctccacctcctgggtttaagcgattctcctgcctcagcctcctgagtagctgggattacaggcacatgcyactayacccagctaattttttgtatttttagtagagatggggtttcaccatgttggccaggctggtcttgaactcctgacctcaggtgatccacctgcctcagcctcccagagtactgggattacaggtgtgaaccactgtgcccggcctcacatgaggtcttaaaatgttcttttcaacagtattttgtggggtgaaaatggccaggagtcagaatgccttgatcactagattatagaccatggtatttacctacctgctacatccttttatgatgaataataatagcagtacttgtattattgtagttaaattttaaaatttgtttttgcaataattcctaacaagcaaaaaatttgcaagaattatatggagaattccaatatgcccttaacccagattcatgaattgtgacatttcaccacagttrtttatttatttagagacaggatctcactgtgtcacccgggttggagtgcagtggtgggayctggactcactgcaacctccgccttccaggctcaagcaatcttctcacttcagcctccgagtagttgggactacaggtgcacaccaccacgccctgctaaatttctattttttatttctagagatggggttgccatgttgcccaggctgcacagttgctttttttcttccccaccgaaccccctcgcgcaggctggaatgcaatggcgcgatctcggctcactgcaacctctgcctcccgggttgaagcgattctcctgcccgagcctcccgagtagctgggattacaggtgtgcaccaccatgccctgctaatttttgtatttttagtagagacggggtttcaccatgttagccaggctggtcttgaactcctgacctcaggcagttggcccacctcagcctcccaaagtgttgggattacaggtgtgagccactgtgcctggccacagttgctttttaatacttttgtttcccccartgtccatatacatataggtatatctggggtcatttgagacaagttgcagacattcccttttgtgcctaaatacttaagtgcttaattccttgaaggacgtttctcttatataacacagttatgtacaattaccaaaatcaaataaattgagcatcaatatattgctattaatctaatttacaatcctttttaaaattttgctatttgtccctaaaatgtcctttgatagcatttttttcttagttcaggaacagaccaggtttgtcagttatatttagttgtcctctctccttggtctctagcctggcagagctcctcggttttctttgtctttcgtgatcttgacatttcgaagaggacaggccagtttcaaggcagttactttgtatcctgtccctccatttgtatttgttggatgtggcctcaaaactagatttatttatttatttatttgtttatttattgagacggagtcttgctctgtcgcccaggctagagtgcagtagcgtgatctcagctcactgcaacctccacctcctggattcaagcagttctccctgcctcggccactcaagcagctgggattacgggtgtgcgccaccatgcctggctaatttttgtatttttaatagagacgaggtttcgccatattggccaggctggtctcgagctcctaggctcgagtgacccgcccgcctcggcctcccaaaggtctgggattacaggtgtgagccaccatgcctggccagtaattttaaacagctgaattaaaatcctcattaataggaactcattattgggaggaaaaatggatgacaggtttttttattgttgttgctttgttttagttttcarcattttagataattttatttcaatcaaggtgtatcattttttttttttttaaatcatagagatgggatttcgccatgttgcccaggctggtttygaactcccgagctcaagtgatggcacccgcctcaccctcccaaagtgctgggattacagatgtgagccactgtgcccagccaaggtgtatctcgaacaacatcaattggattaatttttgatacaactgccatggcttaataaaatgtatttgaagtactttgataatcaaattagctatctacatggaaatgaccttttagtcattattttaggaaatatttggttgggcacagtggctcatgcctgtaatgccagcactttgggaggctgaggtaggattgcttgaggccaggagttgaacactgcagtaagccatgatcacatcaccgtactctagactgggggacagagccagactccrtctctaaaatacacgctacacacacacacacacaaacacagttgagacttcatcatgtaccaagtctatgctaggtttctgcatcacagagatgaacgtgagagcctggggtcccaggaagttataatccagtgaggcgttcaggcctgtagacagatagttacaaaaagtggaataagtgtggtgatcctcataaggaatgtcccttttctggccactgcattctcggttctgagcatcgttcccaggagttgaaagtagtggctccaaacttgctctgccagggttcaggagtcctgcttccacctgggtagatcctttaagttctcagtaaatgaatctacatcagggaaaataatagcacctaccttaragggttgctgtaagtgaagctcttgcatgggaagagctcagcactgtgccttgggacttggcatggtggagagaggccagtgtggatggtattgaagcaggcatttcttaagtgtcagtgggtggattaatggaggtatgagccaggggtgatgggagtccatcagagagaatcyggtgatgtctttccagaagaggtgaccttcatcttgagtcttagaggagggaagagagcaggactggctacatgatttgtgggacccaatgcaaatgaacatgtgggacccttattcagaaattattaagaatctcaagatggcaacagcagggcattaaaccaagtacgggacccacctgaacatggaactcaggccaggacccagatggcatgccctggtaaagagttctccaaaaagagcatcaagtcgaatgcaaagctgcagcctgtgacggctggggtggcaggctacagaaccccaggttccaacagcagcttgctgttcccaattaggcgaagtttcctgagcctctccagagaagaccacacaggccagtgagaacctgaggctatggaagggttgattctgtgtttgaagaattcatatacagtacaggcatgctataggaaaaaggtggcactgagctgtttgaaaaactgctgttcaaattaggaagcaggagaaaaaatgaagaaaggctacctgccatcagctagccaggtgctagataaggtttaatctgtagtttcttttsgttctttatttttgaaatgggatttcactctgtcacccaggctggagtacagtggcacagtcacagttcactgcagtctctacctcccagacttaagtgattctcccacctcagcctcccaagtaactgggaccatagttgcatgtcactatacctggctaactttttaattctttatagagatgaagttaccaggccagtctcgaactcctgggctcaagcaatcctcctgccttggcttcccaaagtgttgggattacaggcataagccaatgtgcccagcctagtctgtagtcttctagatagccctgtgaaggtagcttttatgggtgtggatgtagggaaggaaaacatttctttctctcactcattgctaggttcatggctgaggcccctataacaaaatagaggaaaagcatcctgtcttggatgatgagctagcaaaaggcagagctggaatgtgaacccaggcttgtttgcatgtaaaaccttagcctttaagtcaagttacctactatgtgccaggaggtgagctcagcacttttgcatataatatctcaacaactgctacagcgttcagccttaatacatatgctacaggggtgcttttaagatttgagtcattttaaaacacatctctgagtccaaagaaacctatcaatctagcctcctcattgtcagatggacaaactgttgaaaaccacatggggtagtgcttttggataaacaagcatccctttcctcctacttacaaattcacatttaaacatcagagacttaagagcagttcttagacctttatgagtttttatggttttaattatagagctgtcttcctaaattaatagcattcagtggcactggaaataaagccagaaaggagaagatcttggagatgtagcagacccagcaaaacttagttttgttactcaagagaattgggttggattggaaaagaataattagtgaaggaattatttctctttatacttgccttccccaaaccaaaagtttaatgggggtggggggttgcctcgattatcacaggtggtgaggaaaatgggatttgcattttcacaagatgaattccatgggtgttcataccaggaatgctttcccagactaacttctgatcaaggactraatgaagcaagcggacaattagccttgaaagaagtgcaaacagaggcataattaacacaattgctgatgcttctttcctgctggggacatctgggcaggctgaccataagtcataagccaaagatctatgctcttttgcgtatcttcagctttctcctacatatgtggtataaaaaatcgacctgatatctttccttttccacttctttctagatagttgagtgatgctctctgcttactctttctcatttacagaatcacctgtaacctcaaggatctcttgagtaacaagagacaacaaatttttcagtgtagcacaaaacccatgttgtaccattatctaggattgcaattaatgtgacttaaatttcaagacctaagaatgcacctttttcttttttggagttgtatgtcattgtggttaatcagaaggtataataatgtagggaaggtgcattcattaatggggaattgtttagctaataattaaattgaaactttatattcctaaacccaagtactacttatgtttcaaagtataagctctgtccagacatggagaacactaagatatgcattatgatttttttttaaagaagagaatggtatggatagacttttcaatgttactgcagcaaaactgctgcaaagatccttcactaaggacctcaaagacaattcagtgagcaaagaattcccttcccaaatttcccttgtctgagattcagagcatcagcaggtacaagtgaatcttacttataacagattttgctgaatactttttcatactgcctggtacagatataaagttttttttttgtttgtttgttttttgttttgagatggagtttcgctcttgttgcccaggctagagtgcgatggcgcgatctcggctcaccacaacctctgccttctgggttcaagcgattctcctgcctcagcctcccgagtagctgggattacaggcatgtgccaccatgcccagctaattttgtatttttagtagagacggtgtttctccatgtcagtcaggctggtcttgaactcctgaccacaggtgatctgcctgcctcagcctcccaaagtgctgggattacaggcctgagccactgtgccccgcccagatataaagttatttaagatccacaaagttcagattttcctttcaaagtactcaatttcattttagtacaagtcattggtgaactgatctattgtttaattaaaaaaaaaaacaacaaaacaccagaaactcaaacttgcaaattgcactgttattcccaaaaggtatttatttcccccctgtaagggtgttcgtctacttcatcatttctgggcaccataaaccggcaagaccatttatatatttattttaaaagccactgttgggtataaacttgttacatttaaactgcagccttttttttttttttttttaagttcccactatttaaacaaaagccccaggaagtggtagtgattatttataataatcctttcaactctttgcctgttttcaaataacagtcttttctttggctttggggaatgcagacaactctatttgaatatgaaaatttcaactttaaacctctgaactctgctgggtctgcagaggcgttttaatgtcaacctcaggaaatgtacacatgaagcagaatttacaactcatcactgtcacagttagattagagtgtgagttaaagagtaatacattaaccagggttagtgcatggagattgttgttagagatctacaaaagcaatcagtgccctgcatgaacaatgaaaaatacaagtatagatggaggtgttcagggtcaaaaaataggcccacacatattactgccctggaatttattaaaaaaawtttttttggtaggctattctgcagtttgactgaattgtcatttgcttgtttcgactcaagggaaacatctggtttctccctgcaatgtagacaaactgctcttattctgaagctgtcatccatgaaaggcatggtttgggctcaataggtttgcttatgaaaggcttgggggtccatcgctacagaaataaacagctctaataattggaartttgttccccgttacaaactctgattgagagacgacttgggtgaagtggcgaaagctgaaagggatagatttattagaagacttttaatgatttaggatgtggcaggcagagaattttccgcttaactttkgcaaaaatctcttacctttgtagaatttctgcaaatgcgtttaaaaatcttggagcctcgatattggagatggggtgttacaggaaaagttcagagttctgtggcctcggttcttaggwcagggccaggttttcctgtgcactttataagaagatattattgggtgtttttacttcccttctggaccagctacataatttgtgggacccagtgaaaaatgaaaattgtggtgggaggtggggttgttcaaaaagtattaagatcaggtggttagatcttgagtttaaaaaaacacaaaactgaccaagaattttaagacattaacagtgaagcatcgcccaagctgggagtgtattggtcctttttccatcttaggagtctctggggaagatgagaccaaaacaaaacaacaacaacaaaaaaaccaaggagcgcttgggaagtgtgcctgccggaggcctgttaggagggcattttcttttctgtcagatcaattgtagggagagttcctgcccttttttgagattggtaataattgctatcaatgtgctattttttctttstgctgttactttcttaggaagacaagaacccttctgttaggttacttctccstatcttgttcttccccttttttgcaacaatgttcgtagaagactcagaatagtggttgctgtgaagttagaaatcatgtgttttgggccctttccacacccttaccgattttttcattctgggagtcagttctgaccactgaatgcccagtgattcctcacttctaactttggtctctcttttctctccctctttctccctaccaacttgagagctccttggagagggacattttagtcaaatactgacagccaagcctagggcctggctggtggaaaactcccagtaaatatgggaatgtaaataacagtatctgcttttttatctcttttcttcttgctgctttttctccttttcattctggttttatttgtattttctctcattacatgcacacacacacacacacacacacacacacacacacacacgaacacacacaccatgaagcatgaaggcccaaactatgtatctatagatatttaatttttttttttttttttttgagacagagtcttgcactgtcacccgggctgtggcacggtcttggctcactgcagcctccgcctttgcaggttcaagcgattctcctgcctcagcctcctaagtagctgggattacaggcgcctgccaccacgcccggctaattttatatatttttagtggagacagggtttcactatgttggccaggctggtatcgaacgcctgacctcatgatccacctgcctcggcctcccaaagtgctgggattacaggcrtgagccaccacgcctggcctaatttaacttttttaaaaaatagagacagggttttgccatgcggcccgggctggtctcaaactcctgggctcaagcaatccacccgcctcggcctcccaaagtgctaggattgggagccactgtgcccagccaaactacgtgtttttgatcaccaaaagaaaagacaacatggggcaagaagtccaaattgacagcactctgcagtagctcaacagaaggggagagtctgggaatctgtgtttgttcaagctgcagatccgaggctcatcccctcaaaacactgcaatgctaatgaatgaccgtggctaaaaatcccaagtgacctcatgatggtgtggctccttgcttcctcccttagaggtggagcaagagccctgttggctgatggacagttgggtacagtaggtgtgtttgcatgaaggattggcctgctggggttactcagaaactgctctgcaaacacagaggattaaaggggtttttgttgaggcagaacagatggacagagagaggcagagttcaaatgaatggatcataaatcagcactcacttgcagaagggaaaaatctgggtctggtcacttaaaaatttgagctaattttaattattatttttttcttcttaggaaagcaaccttacgcttaatggaaaaacaattcatgtgaaaaatttggaaaatatatgtgccagagaaagccctgctgatccttttagtgaaatctccctgattttgtcctctgtcctgctaatgtacacacatatacataggcaattattatttaataagaatgaaaacacatgctcttctatgagttagattttaagagggaacctgtaactagagcttgaagatctgaacccgggtgtgatcatttgggccaggtcagcagcataaattttagtaataaaaccaaagacaatgtgtaaatttatgtttgggaaagttggggcaagctcaggtgaaggaaaagttcattggcgctgagggccacgttgaatttacggtcttccttcaagtaatacmttcctgagctcccagaaaaacgacaggtctgtgttcatttttccttttgccccctagtggagcaagaagagtggttcaggccatgaaatcgttctgccaattagaccgtctctttacccatttctctctttctttcgctccctctctgttttctattttttgagacggagtttcgctcttgttgcccaggttggagtgcagtggtgcgaactgggctcactgcaacctccgcctccygggttcaagcgattctcctgcttcagcctcccgagtagctgggattacaggcgtgygccaccacatctggctaatttggtatttttagtagagatggagtttctccatgttggtcaggctggtctcaaactcctgacctcaggtgatccgcccgcctcggcctcccaaagtgttgggattgcaggtgtgagccaccatgcccggcgctctctctttctctgtctctcttttttgaggcagggtcttgttcttttgcccaggctgccgtgcagtggcacaatctcagctcacagcagccttggtcgcctgggctcaagcattcctcccacctcagtctccggagtagctgggactgtaggtgcacatcaccacacctggctgattttttgtgtttgttgtagagacagggtcttgctatgtygcctaggctggtcttgaactaataggctcaagtggtccacctgtctcagcctcccaaagtgctgagattacaggtttgggtcactgygtccggcctctttacccgtttctaatcatctaattggatgttctccagtctctctgtaaatgtattgaccaaagcccaagacataatgaaaggaggccagtggatctctctctagcaggccagggctccggtcactgaattgagtttagcatcacattttatgaaaatgaggtgccattagatgctagatgctcacttagtagggtgaaatactcacactaggagagtccagaagtcttaccagcgatcgagggttagttcagctcgccattgttagttgagtgctttctagaagtcagtagtgttggccgggcgcagtggctcatgcctgtaatcccagcactttgggaggccgaggcgggtggatcacgaggtcaggagttcgagaaaagcctggccaatatggtgaaaccccgtctctactaaaactacaaaaattagccagtcttggtggtgggtgcctgtagtcccagctactcgggaggctgaggcagaagaatcgcttgaatccaggaggtggaggttgcagtgagccgagatcatgccactgcactccagcctgggtgacagagcgagactccgtctaaaaaagaaaaaaaaagaagtcagaagtcagtagtgtttatatcagaccttttgatgccagttctacttattgtttaatgacaagatttaacgacacacaaaaattagttaaaaacaaatcttatggaaccgattaaagagagttgtttcaataggaaaacattggaatgctctgaaaaatctcaatggtagtgaaatacttaaaaaataaatgatattaaattatgttaaaatgtaaaatatgtgagacactaaaagtctagagttgtgcacttatattatttcgtgtctttaagtctttaagttctttttttttttttttttttttgagattgagttttgcttgtgtcgcccaggctggagtgcaagggtgagatcttggctcactgcaacctccacctcccrggttcaagcgattctcctgcctcagtagctgagattacacgtgcctgccactatgccttgctaatttttgtatttttagtagagacaggatttcaccatgtttgccaggctggtcttgaactcctgacctcaggtgatctacctgcctcggcctcccaaagtactgggattacagacgtgagccacygtggtgcccggcctataattactttttatctctctcttagctgaacatttgtaagttacatgggcttgttacaagatagcagcatcataaagattttgtggtgttgctcctgtatgtgaatttcacctatcaccagaataaattctctcttcctctctgggctccctcacagggtgtggggccacctggccccaactggccccttccactttcatctctcgctgttccctgctttcctgatgctttacgtcttgctgaaggagttctagcctttggccgtgtgcatgctgttagctattcacctgtcccactttctcacatctcagggtgcctttcgtctgttattggtaaacacagtgtccttcgtctgtctaattctggcctcaactctcccacagagtttgttgacagccacccctctgattctccaacccctttcatccattatttgtttattgcctcctcccctccactggaattgagtttcacgtatccccagcccttagaacgcctggcatacagcaggcgttcagtaaatgctgtctggctgttgagacagggtctcactgttgcccaggccggagtgacatgatcacggctcactgcagcctctatctcctgggcacaagcgatcctcccacacctcagcctctcgaatagccgggactataggcatgtgccaccacatccagctaatttttatgtttttggtagagacagggttttgacatgtggccaggctggtttggaactcctgggctcaagccatctgcctgcttyggccttccaaagtcctgggactacagatgtgagccactgtgcctggcccagtcatgttttttgggttgaatggaactcactgcttttattctgtactgtggagtcagatgcaggtgtgaatcccagcactgacctgttctaactctgagactttgggggaaggtgggacatcctgagyctcctttcctcgtctgaaagctggagatggaactaccttcttctgagggctattgtgaagattaaatgaaaccttcaaaatctgtacagtgctgagcacagaattagcatttaatgttagcttttactgtttatctaaacatccagcaaaaattatatagtctgatcataatcctataaatcaaagcatgtarcaattataaattaaaaagtaaatcagtcatttggaattagttagcttctttctttttggtggtgttgaaaattaagacttttttccccyggtactttgcatctaagtcactgttaagtggtgttgaaaattaagacttttttccccccactactttccatctaagtcactctgaaggcaaataaatgatctttcatgaagggctgaagttattccagtgccctgtgaagtgggcatttatttctgcaacggcctctgyagcggttgaaccctttcctggagaggcaggaaataatggtgctggagtcactggcagctgtgtgtgggagcgtgtacttctgggtgtattgtgtgtttgcaggctgggcactctgtaaagacgtgttgaattgaaatgaattaagatrgtgatgtatcttgaacctgctgctttgcaggcacagtgaaggtgaagagttctaacatccaagttggagaccttatcatcgttgaaaaggtgagcagaatctggaagcttgtgtgtggataccacttcatgggtcctaatgtgtcatttgtgtatctggtagacgaagtgaatgttgaattttgggattctatccaaaaactttgcctggggagaaaaatctctttcctgtgagacagacagacagmcacacacacacacasacasacacacacacaaatattttttcaaggtttatatgcgttggttagccagaaatcctgcttacaaacacaagtacaagttttgatttcctgttcgatgtgcttattattttgggataaaaaatatcataaagtttttcctagaagtctgcttactacatagacacttaaaatatttatctaatttaccctttgagccattttagcttgcatttcctgacstaaccattgtgcttgtctattattttatggggagcaggggttaagtgtaacctgagaacagtaaaaagaccaaaaatacattttaaaaaatagccgtgtcagtatgtttgctactttagcaaacactcatgtctttttctagtgtgtatatttggaaggtattggattttgaggggtggctctggagaggcttggaataatatttgattagaaaagggttgtgtcttaacttgtttctgtagaaattgagctatgctcttttaaagggattaaatccaagaactcaaagctgctttaaggtaaagtgaaactcttttgggtggcagctcagaagaaccacacaacccccatctatgttatcacatacttttctgttcataattaaatgggggctactggctccccacaccccccagttttttttagaatggcttttgttgcttcttactactttccttccttattaaaatccactaaaagccaaacatcaagctggtaagttggtagaagcagaaagcgagagaggagggtctgtcttgagtctcagcagacagcctggaagagagccagctggggaggcaggcttttgggatttkgggaggtaatggttgaatgtgccagaaaactagaagctctctttccaagataagattttgataggggattagtaaagtagcagcagtgtgcaagatttttcagattcaaaacaaaataaatccccaaatctgtctttgacaaaggcagaaacgtaaaagagtctgtgagtttcagtcccccctgccccaacccaccgaggggttgggggtgggggcggaagcccccctccccaccgcacagcacacggtcattcattcacagtaacagtctttcttttcataacacagaaccagcgggtccctgccgacatgatcttcctgaggacatcagaaaaaaacggtaaacatctgagatcaatttggaaaataaccattaacctttcagtggtaatttggcaaaataatcatttgaaaatgtcacaaagtagattatcattttggagccatggaggcaaatcaaaagcatctttttaaatagaccgtgctttttaaacagtgttgttggtgttttaaaagtcaatagattgtgatcattaaaaaatacagtttgtggaacaccggctgactcacagctggtaaagtcacgcatacagtggctttggatttcctctcccggctgtgttaagctcaacctcaggagttgggacgaggaagtgtctctaccatgtagaagtaaacagaaatcctttctcttctaagctgataccagcagatgtgtcatgatgggggcagtacagaaactggggagaggtgggcgtcttttctgccctttgttcatgagtcaggggaccttgcctatagcacctattgatttatttattgtagcctgagtttgtggggtgggaatctctgaagtctcctacaaggcccttaactccttgcagttgttccctagggtggcagctgtcattgcctgcccaccctatgagtctactaaaattgccttagtttttttttttttttttttccttgagaccgggtcttgctctgtcgcccaggctggagtgtagtggtacgatctcggcttacctcaacctctgcctcctgggttcaagccattctcctgcctcagcctcccgtgcaccaccatgcccggctaatttttgtatttttagtagagacggggtttcaccgtgttggccaggctggtctcgaactcctgacctcaagtgatccattggcctcccaaaatgctggaattacaggtgtgagccaccacgcctggccaaaatggccttagttttaatttttgttatttaagytgttctgaggaaataaggctgtttttcccttatctggcatgatcggaggtttttgaatacatgaaaaatttacattcgtattcctttgaggatgctgcaacgtatttcattatgaatagaattaaagtacaagtaaaattttatactaatatgtaatcaggacaggagataaaaggcactagattaaaacagcctttgaaaaactgcagctttgtctttaaattcgttcttgtgtcctatttagtgaaaacagagcattatggagtagggcccctgacatgctctttttttcttgaaaaaacaaacaaacaaaccaaaattatgagtgttctacattaatagttctcaaagactgaactgcagtggcagtgaatggggtatgttctgtatctgatggagtatacagctgactacttgcacggatctgtatgtcagactgaaagatacacctctgaaatgtgccagcccataatgacctagtgcttgcctggatcgatcagtcctgttctgaactctgcgcacgaatcagctctttaattgtcacaacatctctacagggtcagtgctgttcctatctccacttttacacacgaggaaactgaggctcagagaggataggcaactctcagggcacaaagctattacgtggcagagcctggacctgcactcaggtggtttgggtcctgagaaggtgctggcgatgcctggccagacggctcggaatgctggtcaacctgtgctcgtccccgttctatctccccattgaatctttacagcaagcttgcgaagtctgcgtttctccacgttttacagacactaaagcttgacaagtccaagaaactagctggggatcccactcagrgggagtggcggagtgaggatttgaactctgagctttttgaccccagagcttattatggaagaagtaggagataggatatgtattttctcttgtggtcgctggccattggttggctgtttttacaaggaccagagcagaygctgcccagagctgccaagggaagggtgcttgaggtgcagrtganggcacccgacttccttccacagggtcatgcttcttgcggacggatcagctggatggggagacggactggaagctgcggcttcccgtggcctgcacrcagaggctycccacggccgccgtgagtagctttccctgcagaagcccatgcgggcaacctatcttagcagggttctcaaactcagatacctggggggccaggcrtgggatggcaacttgtgaagtggggccagtaggggagcgtggggtcctggagagcccctgggcctagttggctttcctgacgtgaccaaagcagaccccgagtgcagggagtgagctctcctgcgggaagctaaaaaccataaggagccttgccaaggggcctcaccaaaattgaaaaggtaagccagagcatgccattcctctgctcaaaacctacgaaggtaggccaggctcagcggcatgcacctgtagtccccgctcctcaagaggctgagtcgggaggattgcttaagcctgcgggttcgaggctgcagtgagccatgattgtgcctgggaatagcaactgcactccagcctgggcagcatagtgacacctgtatctaataaaagtaataaccataaaataaaaaaaaaacaaccctccaaagatttctcatcttactgagaatcagttctgcggtgcttgctgtcgtcttcagctccttcccatttgtctctctgcagaggctccgacctcagtgcctggccctctctcctctgcctgccagcctgtcgggtctgtcattctgtccctggatgtttactgttgccatttcctccactgggagccctctgatccctggcgagtctgcctggcagggcatctccgcactccactgagcttttgctcacgattctccttatcggagaggctctttctgcccacctctccctgcatccctgcttcactcacttccaggcagcatccctgcgggtgggttcttcctgttgtattctctgccgtatccccagtgtgtatgatggggcgcaggccctggctgagaggatggccgcrgtagttggccatgtgtaacttaagtgccyggtgagtggcatgccccactgtggtctggaaggatgaagtggaacacagaagcttcccctgtgctcacgtcacatggatcgaagccactccttactgtgtcccctgagggaggaggaaagttccatgtcttggcgggattgacgtaacaagaaatgtagccaccctatgaatgatttttcatggataataaaaagtgaaataacaccattattactgttaattttaaaccaggaattttattttattatttatttatttatgagacggaatcttgctctgtcacccaggctggactgcagtggcatgatcttggctcactgcaacctccacctcctgggttcaagcaattttcctgcctcagcctcctgagtagctgggattacaggcacccgccaccacgcccggctaatatttgtatttttagtagagacacggtttcaccgtgttggccaggctggtctcaaactcctggcctcaattgatccacccacctcagcttcccaaagtgctggggttacaggcacgagccaccacctcccaggggctctccaggaccccacgctccccctccagccccacttcacrtgatggtggctgctacaagtccccaggggctcctagacagtagttagaaactcactgttctaacagtgactgctgctccccctgactgtrcctgtcttacgccacttcacatatgctgctttgaaatgtagtttttgccaagatctttcacttttgggctttcttatcacctaaggttgacttcttgtttgctttttaaaaaattgtgctaaaatacacataacataaaatctatcgtcctaaccgtttttaagtgtacagttcagtggcatgaagtacattgacgttgtcatgcaggcatcagccgtgttcatcttcggaacttttttcatctttcaaaactggaactctggactcattaagcagtaactacattccccccttggcccagcccctggcaagcatctttctgttttctgtctctatgaattaaactaccctaagttcctcctataagtggaatcacctagtttttgtctttttgtgactggtttatttaacttagcataatgtcttcaaggttcatccgtattgtagcctgtgtcagaacttcttcctttttaaggctgagtaatattccattgtatggacagaccacactttgtttatccattcatccactgatgcttgtttgagttgcttccacttcytggctattgtgaataatgctgctacgtacatgggtggacagatgatcacttcaagtccctgctttcatttcttttgggtatatagccggaggtggaattgctggattatatggtagttttctgattaattttttgaggaagtgctgtttccatagctgctgcaccatcttgcgttcccagcaacagtgcacagggcctccacattctccacatcttcacacttgtttttgtttttgttttgatagcagccatccttacgggtgggaggcgttcttacttttttcagctcttcccagaggtttatacagagtagatgcccagtaaccatttgttgaatgagtattttcttttcttttttgagacggagtctcgctctgtcgcccaggctggaatgcagtggcgcgatctcagcttactgcaaccttcacctcctgggttcaagcgattctcctgcctcagcctcctgagtagccgcaattacaggcacgcgccaccatgcctggctaatttttttgtatttttagtagagacagggcttcaacatgttggccatgctggtctcaaactcctggcctcaagtgatccgcccacttcagcctcccaaagtgctgggattacaggcatgagccactgcacctggcctgaatgagtattttcaatggtacaaacaagtcttgcaagccagaatttagcagaggagggtctgccactttccagggtattcataggtgtgtagcatcaccccatcaagtctggaaagggctgagtaaacagagaaacgagggtcttcactgtagagtctgtcagggtgctttgagatactgtatgctgcgactcctcaacttacttaacagaggactttcstcttctttccacctcccctgtaattttgaggggccatttgctgtgtgtgggaaatatagttgctttggaaacatagtggatgcctcctgaagtcttgcattgtgaactgactttgactcccgaatgtgcsttctgttgaacaggaccttcttcagattcgatcgtatgtgtaygcagaagagccaaatattgacattcacaacttcgtgggaacttttacccgagtaagtgagcttccttcacatgggatcctgtcaccgggagtgtgtaagggatgaaatgaaggycaagaagtactgacagttctttgtcaggaagttgtttcatgccaggtggggacataaagaaggcaccgccttgaaagccagcrtattgtttctcagtaaggtcgacacaactggaattttcttctggccttggaacagcttaaatgacctgacaacttagaggaagcatttgctgcaattcatgtgaacgctggcgtctgaaagagtttttctttctctgtccttcagatggatctgtgtcctcttgtttttttttgagatggagtcttgctctgttgcccaggctggagtccagtggcaccatctcggctcactgcaggctccgtctcccgggttcacgccattctcctgcctcagcctcccaagtagctgggattacaggcgcccgccactgcgcccagctaattttttgtatttttagtagagacgggttttcacggtgttagccaggatggtcttgatcccctgaccttgtgatccgcccgccttggcctcccaaagtgctgggattacaggcatgagccactgwgcctggcctttttttttttttttttttttttgagacggtctccttctgtcgcctaggctggagtgcagtggcgcgatctcggctcattggaacctctgcctcccgggttcaagtgattctcctgtcttagcttcctgagtagctgggattccaggtgtgcatcaccacgcctggctaattttttgtatttttagtagagacggggtttcaccatgttggccaggctagtcttgaactcctgacctcaggtgatccacccaccttgatctcccaaagtgctgggattacaggtgtgagccaccacacctgactttgtcctcttttattcatacaaatcctatctgccattttcataatttttaagccacttccagacctttcagaagagaaatttaatttggatttaatttgttttaggaggcctggcgtggtggctcacacctgtaatcccagcattttgggaggctgaggtgagcggatctcctgaggtcaggagaattgcttgaacctgggaggtggaggttgcagtgggccgagatcgcgccactgcactccagcctgggtggcagagcgagactccatctcaaaaaaaaaaaaattattttaggaatatgggtcaacaggtttctagaacccatattacattgtccacattctctttctataagccacaaacaaagctggcctgcaaacagcctgattggtttgcttttacgttttgattcttaacctcataaaacatttttcagtgctaagaggcctgcgcttcttaaatcacaggccaactttttcacatatttctgtgggagatgaaaaccccaagggcagtagtggaagagcttggccctcccctcatggtggagccgtcggcttccaaactgggcttccaggttcatcggggggagcctgtctttctatytccagyggaccatgctagaagcagcytgtggattctggggaagctttggggggtgaacgtgtgtcygtttggtcttttccaggaagacagcgaccccccgatcagcgagagcctgagcatagagaacacgctgtgggctggcactgtggtcgcatcaggtgaggcrccgttttgaggaatgtggtagcaatttgaaaaggaaagaaaatccttttgtaattagaataatcatctgtcagttggaaaaatgagtgctcggtcaaatggcattttccacttgttccgacacctccagggaattaaactgacatctaattgcagctcggacacttagagatgcctggaggagaagcccgcgtggcctgtggacctttctgcagcgtccatgctggcagtagctctaattgcctgttcagattgacattctaatctgtaccagagggggaggcagcctggatgttctggctggaggctgtgtttgtagggtatgtygcgctgggactgccagcactggggccctaggaaagggcatgggcttgagctggagcttctgtgtttaaacaccaagaggaagtggatattggtgcctttctttttctttttctctttttttttcttttctctttttttgagacaagktcttacactgtcacctaggctggagtacagtggmacaatcttggctcactgtaacctccgccccccgggttcaagcgattcttgtgtctcagtctcccaagtagctgggattataggcycgcaccaccacgctggctaatttttgtatttttagtagagatggggtttcaccatgttggccaggctggtctcaaacttctgacctcaagtgatccacccacctcagcctccctaagtgctgggattacagatgtgagccactgcacctggcccattggtgtytttcagtgctgggatgacactgatcaggactgcatgggctgaatatgacccccgatagcagtggttaacatcagcggcatgcagcccatgtgtcaggccctgtgctgggtgcttatgtgtgttacacactgcacttaaccctcctaacggcaccatgagggtagatactattattcatattatgctcattctgcagatgacggaacggaggctgagtgaggttaagtaacttgctctgaggtcacacagcaggtgaaaggcagagttggaacttgaacctaggcattttgctccagaaacagaacttactgtgtagccatcacttttcttacatttcgtgatatcattaacttaatagtgtagttagtattataattctactgctggtgactttctgtctttactattagatgaatcaattttttcctctcttcaaacatagtattctccactccccaccatcaagccgttttactctgctggttgcttctctctttcattcattcattcattcattcattcattttttttttttttgagacagggtctcattctgttgcccaggctggagtgcaggggtgcaatcatggctcactgcagcctcgaactcctgggctcaagcagtcctcctgcctcagcctcccaaacagctgggactacaagtgcatgccaccaggcccagctaatttttaaatacttttttagagatgggggtctcactcttgcccaggctggtctcaaactctcagactcaagtgatccttctgcttcagccaaaacgctgggatcataggtgtaaaccaccttgccttttccttctttgttgctctctagtacagtagtagacactcgattaggatcctgtgtggcaaggagagggaatgaagcagcacaaactatccctggagtaccgtgtgtcaccatccacacatgcactacttaatacaaataggcagaggtgcactctcccttgaggttttttctgctacattttatttccactgcctgcctttattttcatcatactttggtacgtctctcagtccccctgatgactaaagagcgagaaattctgcacggtcatgcctgggccacgcctgggcacagccacccaggggacgcagcatgcagacgttcacatcctgcccctccttgccactttccacccatgtmacctgaaccaattttttcttgctttcaagtcatttattaacaaataataattaattactctttttattctttgataatttgactgaaaaataattatctcattcagtttgaatttcctagattacctggcaggtggtcatatttgcatctgtctcttttgtttctttgtaagttactagttggcttaaaaaaaaaaaaaaagagtccctctgtggcccaggctggagtgcagtggtaccatcttggctcgctgcaacctccgcctcccaggttcacgtgattctcctgcctcakcctctccagtagmtgggattacagrcatgtgcaaccacccctggctaatttttgtatttttagtaaagatgggatttcaccatgttggccaggctggtctcgaactcctgacctcaggtgatccacctgcctcggcctcccaaagtgctggggttacaggcatgagccaccgcacccagcctactgttttaattttgatttaattgcaaatatagttgaatgtctttctacctgtcagctaattcttaatattctggtctatctactttcctttgtggttcttctttttctcattactttgttagaatgctttatagaggaaagaatatcaaactttcactttttgtgggttatacatatttttkcagttttttgtttgttttttgtttttgtttgtgatgggctttattttcttttaccatatagaaatttaaaattttttattgcctacattttctttttttttttaattatactttaagttctagggtacatgtgcacaacgtgcaggtttgttacatttgtatacatgtgccatgttggtgtgctgcacccattaactcgtcatgtacattargtatatctcctaatgctatccctccccactcccccacgccacgacaggccccggtgtgtgatgttccccaccctgtgtccaagtgttcttactgttcatttcccacctatgagtgagaacatgccrtgtttggttttccgtccttgcgatagtttgctgagaatgatggtttccagcttcatccatgtccctacaaagggcatgaactcatccttttttatggctgcatagaattctatgcatagtattctattcrttttcttaatccagtctatcattgatggacatttgggttggttccaagtctttgctattgtgaatagtgccgcaataaacatacgtgtgcatgtgtctttatagcagcatgatttataatcctttgggtatatacccagtaatgggatggctgggtcaaatggtatttctagttctagatccttgaggaatcaacacactgtcttccacaatggtttaactagtttacagtcccaccaacagtgtaaaagtgttcctgtttctgcacatcctctccgtcacctgctgtttcctgagtttttaatgatcaccattctaactggtgtgagatggtatctcattgtggttttgatttgcatttctgtgatggccagtgatgatgagcattttttcgtgtctgtttttyttttcttttcttttttcttttcttttttttctgagactgagtcttgttcttgtttcccaggctggagtgcagtgttgtgatcttggctcactgcaacctccaccttcccaggttgaagtgattctcctgcctcagcctcccgagtagctgggattataggggcccgccaacacgcccagctaactttttttggatttttagtagagttggggtttcatcatgttgtccaggctggtctcaaactcctgacctcatgatccacccgcctcagtctcttaaagtgctgggattacaggcgtgtgcctatgttttcataaaaacaggatggctgttggaaggccatatacattttatgtttcgattcacccaggaaacttgcctcttcttcttcatgctcctgataaacttaacttacatgtgtatctagccagcagtgtgtttggctttctaatttttgcccatgtgatagacattgaacaaattttagcatattgatttgcctttagaaaaattatttgtgcaaacatcttcctttatgtttactatttatttgtattttwtttttttttttatttatttttggagatggagtctcgctcagtggtccgggctagaggtcagtggcacaatcttggctcactgcaagctccgcctcctgggttcatgccattctcctgcctcagcctccctagtagccgggactacaggcgccygccactacgccaggctaatttttttgtgtttttagtagagacggggtttcaccttgttagccaggatggtctcgatctcctgacctcgtgacccacctgtctcagcctaccaaagtgctgggattacaggcgtgagccaccgcgcccaggcctgtattttctttcctttttttttttttttttgagacagagtctcactgtttcacccaggctggagtgcagcggtgcgatctcggctcactgcaagctccgcctcccgggttcacgccattctcctgcctcagcctccccagtggctgggactacaggtgcctggcaccgcgcctggctaattttttgtatttttagtagagatggagtttcaccgtgttagccaggatggtctcaatcgcctgacctcgtgatccacccgcctcagcctcccaaagtgctgggattacaggcatgagccaccgcgcctggccgtattttcttaaatatatgtgtgaatgaccactttgtgtcctgtgcccattatttctgcttataggttggtttttaaaaaataatttgtaagaattgtttatgtcataagaatattaatattttatttgttgccttaattgcaatgactgtttcacttggtctcatttgttttttggaactaaagtttgcagtttttatctagtcagacctgttgatcttttttcatttcaagacagggtcttgatctgtcacccaggttgttgtgcagagacatgatcagggctcactgcagcctcgacctcctgggttcaaatgattctcccacctcagccttctgagtagctgcgactataggcgcacctcaccatgcctggctaagtttttgtattttttgtagagacagggttttgccatgttgcccaggctgggatcttttgtttctttgtggtttctgttttttgtgtcatgctaagaaaattttccctgctctaaaattataaaaatatccactgactttttttggagtgtttatatagtcttacattaaaatacttgsttyaaggaatagagttaggagaactaacaggcaagggaatattacctcaggtcagactccaggctccagactcttaggcccagtctgtgtttctggccccgtgtgaacaagcagccttatggggaatgaaagtgtaaaacgaggctgggtgcagtagctcacacctgtaatcctagcactttgggagaccaaggcaggaggattgcttgagtccaggagtttgagaccagcctaggcaacatagtgaaaacccatctctacaaaaaataaaaacatggccaggtgaggtggctsacgcctataatcccagcactttgggaggctgaggcgggtggatcacaatgtcaggagatcgagaccatcctggctaacacggtgaaccccgtctctactaaaaatataaaataataataattataataataatcagctgggcgtggtggtgggygcctgtaatcccagctgctcaggaggctgaggcaggagaatcgtttgaacctgggaggtggaggttgcagtgagctgagatagcaccactgcactccagcctgggcgacagagcgagactccgtctcaaaaaaaataaaaacaaacaaacaaacaaacgtccaggtgttgtgttgtgtgcctttggtcctagctatacaggaagctgaggtgggaggattgcttgagcttggaggtcaaggctgcagtcagctgtgatcaccagtgtactccagtttgggtgacagagaaagacgctgtttattattattttttttttgagacaaagttttgctcttgtccccacgctggagtgcaatggtgcgatctctgctcattgcaacctccacctcctgggttcaagcgattctcctgcctcagccttctgagtagctgggattacaggcatgcaccaccacacccggctaattttttgtatttttagtaaagatgaggttttaccatgttggtcaggctggtcttgaatgcggtgactcaggcctgtaatcccagcactttgggaggccaatgcggctggatcacctgaggtcaggagtttgagatcagcctggccaacatggtaaaaccccgcctctactaaaaatacaaaaaattagccgggtgtggtggtgcgtgcctgtaatctcagttactcaggaggctgaggcaggagaatcacttgaacctgggaggcagaagttgcagtgagccaagattgcaccattgcaccccaaacctgggccacaagagggaaactctgtctcaaaaaaaaaaaaaaaaaaaaaaaaaaaaagatacagtgaaaagcaacacactttaragcagaggatgtctgggtcaaatgcttgtctctttgggtggaataaagaggcgttaaaggcaatgagaacaagatggggttaaagttgtcatgtcccgttgcatctggcataggcagggctggaagttcatgactacctgtcatgtgctcatctccttactagacagccacgtgaataggacgtacttcattttttgtggacggttcaccattcttcttttctaagccttctgtggaaggatagtacgtacacagaaaatcctaaacatagtgcttggtggatttatatttttttctttccaactttattttaggtttgggggtacatgtgcagatttgctacacgggtaaattgcatgctgcgggggtttagtgtacagatgatattgtcacccgggcagtaagcatagtacccaataggtagtgttttctgatcctcaccctccttccaccctatgcttgatggattttaacacaggtaacacatttgtgtgactagcacccagatcaagaaacaggatattatcaccgtccacccccgaagaagctccctccactcccttctagctgccccacacctgcccaagggtaaccaccaccttggctactgaaaatgttagcatttcagtaataaatgcattttcatatgcctgtttgtttttcatctggtgattttcttctctccttccgtcctccttttcatgcagcaagagcgcacctgttcggtgctgaggtccgttgccggtcccagcactgtggtagtgccttaggagacagatgcatgtgcccacaacatgggatttatagtttattagaagtttcgratggaggctgggcgcggtggctcacgcctgtaatcccagcactttgggaggctgaggcgagtggatyatttgaggtcaggagttcgagaccagcttgaccaacatggtgaaaccccatctctactaaaaatacaaaaatgagctgggtgtggtagcgtgcacctgtagtcccagttacttgggaggctgaggcaggagaattgcttgaacctgggaggcggaggttgtaatgagccgaaattgcaccactgcactccagcctgggcgacaaagtgagactcctcaaaaaaaaaaaaaaaaaagaaatttaggatgggctatagaggaaatgggagagagttttatgtatttcctccaaaaccagtaaaaaggaaaacagttgagctgagctgcaaatgcagagaaatctgaggtggaaggagcaatgttggaagggcttgtcagtcttagtctcagagatgagcaatactaattaagtcttcacttatcacttacttttaattgatgaagtgttttgctgccattctcttaacttggtctcataacattacatgaggacatttaatgggatgaggcactgagtctcaggttaagcaacttgttcaaggttacatgccttggagaggtcatctcctgggaggaggagagtggaaggcatattggcatcttgaagaagaaagatatttcagacagttcatgggagatgccttgtggagttaaagatacattttcacttgtctgaattcctctctgtgtgctcggttattttggggggaggggtgcggtaggggagggagagcacagcagtgatctgatggcattgcctgccctgcctcttagtgggtgtatgatttggagtcagtatgagcagctgggcattgactgcttccttaattggcctcagtttcccctgcatctcactgagtagacatctaattgccctctgattctaatgtaaacccaagccatttccttctagttctcaacgccaggaacagccagcaagagtcatcttaattatgtgagatttcacttctgtgttccctataggctgtaactcttgcctctcggttaacaggtctgctattatctgttggaagttgaaaaaaaataaaaaagcttgccaggcagtgctgaggtccgtctgtatcagctggcattaatctgtagaagatgtggttgccatggtagccaatgcagggctgcaaggctgaggcagcacaagagtgaaggataaggggagggatggaggaggaccaggagcttggcagagaaggtggcctggatgttacagagcccaggttgaggaacagccacctcttagaaggtgagaagaactggtgctctagcccagttcttctcaaacttttagtggagagggaccagtttgttgggttttcccctaatgtgtagaagatcgatttgtggtcctgcctctgtgcatgagtaatatgcagccacactatgtgcaccttgccacaagtttttttttttttttttttttaagacagtctcactgtcgctcaggctggcgtgcagtggtgcgatcttggctcactgcaacctccacctcctgggttcaagctattcttctgcgtcggcctccccagtagctgggattacaggtgcccatcaccacgcctgtataatttttatatttttagtggagacgggatttcaccatgttggccaggctggtctcgaacttctgacctcaagtgatccacccgcctcagcctcccaaagtgctgggaatacaggcgtgagccaccgtgctcagcccacaacagtttgatagtgcctccatggtctataccccatttgatgagatgactactctgatcacatgctcgaatattgcagcaatacttaattgctataaaaatttccaaacgctgattctcgggttcagcatttattttgttgtggatgaggaacaaaggggtcacagaatagccctgaccccaggcagcaccacactgttccagagagtcagttagaactccgtgaaatgcctgaccatgacctcttggccttttggagaaaccagatggacactggctgggagaatggaaagggctgcgtggcctgcaggctgcagagggtgggagtgaagagaaccttgagagcaaggaggggctgcagaggtgacagcaggggaaggaggggatcagaggcctgggggtggatactttcgggtcaacagttacaaattgggcagaggatttaaaggagtggatagtggtggatggggaccatggtgagctcagagcacgtgcctgtctaagaggtggttgttcctcagcactccctgggtgtagcatgaggaacgtggactcagtgtcatcagatcttccactcttccaggaaaagccagagatctctttttttagaattttgtttttcttgacagagtgtcactccgtcacccaggctggagtacagtggcgtgatctcggctcactgcaacctccgcctcccaggttcaagcagttctcctgcctcagtctcccaagtggctgggattacaggcatgagccaccatgcccggctgatttttatatttttagtagagatggggtttcgccatgttggccaggctggtctcaaactcctgacctcaggtgatctgcctgtctcggcctcccaaagtgatgggattacaggcatgagccaccgtgcccggcctcatttttttttttagataggcaagctcctgaatttaaaagtggccagttattcagaaccttgaaagcaccgtgcagaccaagccaaggcgcatccggtgtgtgcgtcctctccggttggtggtctcactgaggatgaggctggggtttggatcttgtggaggcagagcctgtgtcctgagcacaagaaggcatgggatgggaaaggccattttcagcagcatttgatggcatcgaggttagccaggccagacgtagagggcactccctttggggtcccccttgttactggggccctctctgaccctgggctctggggattgaggctgagctgcatctgcataggagtggatgcagcggtcgtgtggtcattccaagctcagcccgggctcggttcccactgtccagccatctgctgtggtgacaggggcctgaagggagggctgcctgtgttcacaggagcctgccatctgccgagaagccaccgcaagctctccctggcctgccatctgccgggagcctccttggaagggaactgcattgtgctggagaacattgtttgcctggctgagtgtgttagacccttgaaggacttcagcgcctcctcctagggctctttgtccaggacgtggtcccttcagtgcatttgggggcgggctctttactgcagatgtgcttcagcctcttcggatttttgtatctcctgacagtggcattcctgagagtgagggggagagagcacagagaaagaggtgttttctctttctggcagagaccaaattgcttgtattcctgggatcttccctgagagcttggcagggctggctccttcgtgttccaagttttggctcagatgatgtgaatggagacagtacaaactgcctgccccccactgcccccttccccccgccccgccacccagtcctgtatgtttctccgcttgacttgactttcagsctagcgccactcactccctgtgatgccgtgtttcttggtttccttctttactgtctatctttcctgctgtgttgattttcttggcacacactgagaaggggagagaagtaaaattttgacagatactgccaaatttctctccaaaatagatcacaccagtgtgcacgtcagccagcagtgtgtaccacaggatttttgccaatctaattgggataaaaatgattttgcgttttttgattatttactagattgagcattttcctcttgttcactggccatgttgatttcttgagtaaattgttgactttcgaaggattcatgccttttcttactgtgtctggaggatagaaggggtgggggagttcttaggaaagagttgtccttgggacagacatccccaaatgggcaagttagactgaaagggatcaggtttagcaggaagaatgtgctctaaaaagaagcatctgtttccaagtttccataatagttaatgaaggtaggaatgttctaggcacctctggaagcctgtatgaccagaggcacaaacggcaagccacgcctttccccagtcaccttccattagaagccgctgggccccgtagaccagcattcaccagtacaagttttgtggtaaaaggagaaggctctgggtcttctctgttccatgaggtagctactagcttatatggccatgaaacagggctagggagggtgggcgctgtatttaatttaactgaatttaaactcaaagggttttcagtggttagtgactgttcttttggtcagtgtagccgcagatcattggtttggccctaatgtaaaacctttgatgttctcatagtgtggctgttgggttgggcgaggtggctcatgcctgtaatccaagcactttgggaggccaaggtgggaggatcacttgaatccaggaattcaagaccagcctgggcaacatagtgagacctcatttctacaaaaaaaacaaaaattagccaagcatggtggcatgtgcctgtggtcccagctactcgggaggctgaagtgggaggatcgcttgagcccaggatgttgaggctgcagtgagctattaatatgattgtgccactgcactctagcctgggcaacagagtaagaccctctctcaaaaaaaaaaaaaaaaaaaaaaaaaaaagagactgggcgtggtggctcatgcctgtaatcccagaactttgggaggccgaggcagatggatcagttgaagtcaggagttcaagaccagcctggccaacgtggtgaaaccccatctcaactaaaaatacaaaaattgaggttgggcgtggtggctcatgcctgtaatcccagcactctgggaggctgaggcagatggatcagttgaaatcaggagttcaagaccagcctggcctacatggtgaaaccccgtatctactaaaaatacaaaaattagccgggtgtggtggcaggtgcctgtaatccaagctactccggaggctgaggcaggataattgcttgaacccaggaggtagaggttgcagtaagccgagatcacgccattgcattccagcctggggaacaagagtaaaactccgcctcaaaacaaaacaaacccaaaagttagccaggcatggtggtgcacgcctataatcccagttattgaggaggctaaggcaggagaatcgcttgaacatggtgggaagctttcagttagcccatgttgtgccactgcactccagactccagcatgagcaacagagcaagactctgtctcaaaaaaaaaaaagaacccagtctctcaagaggatcagactcttctatttgcaagcctgcctgtctgtattaatatttcttttcttttttttttttcttttttccattttaggtactgttgtgggtgttgttctttacactggcagagaactccggagtgtcatgaatacctcaaatccccgaagtaaggtgtgtacgaggtcatggggtacattgaccggctgtgggctggttggttctggtgggtgagtgacgagatattaaaataggaacacctaagagtgatatttatacagacattttatctttttatgcatatgtgtgtgtgtgtatgcaataaatacatatacaatacacatatataacacagtacgtaaatatgtagttacatgtttgtggatatatgacttttttgtgcctttttttttttttttctttttttgagacagggtctcactttgttgctcaggcaggaatacagtggcttgattttggctcactgtaacctctgcctcccgggctcaagcaatcctcccaactccacctcctgagtagctgggactataggcgtgtaccaccatgcctggctaatttttgtatttttagtagagatggggtttcaccatgttggccaggctggtctcaagctccggacatcaagtgatcctccctcctcggcctcccaaagtgctgggattacaggcgtgagccatggcgcccagcattttttgtgcttttaggttaaactgtggagcacgtacggtttgcacgccttgtgtttcacccttcacgtgcatctcatttcatcttcataacagccctgtgagtgcatgcttcctttatccatgagaaacggcttcaggaagcaccgtgccctgtccaggctacacagtgaggayggggcaggcccatgtgattcaaaccgtgacccaccatcacagcttacccctcctccaatttttaagagtcagaacattacagaataattgtcttttgtcagtagcaggaaggaatgctgtgtctcctaaacttcagtcatggtcgctccaccattagacgttacagccatcattacaactataaaatcgtttgtttaatgttttagccttatcctggggcatgtttctatgaagttatggatatgatttgttactttttaaaagactagacatgaagataaatgtattattattaaaataataatgtccagggccgggcacggtggctcacacctgtaatcccagcactttgggaggccgaggcaggtggatcacytgaggccaggagattgagaccagcctggccaacatggtgaaactccgtctctactaaaaatacaaaaattagctgggtgtggtggcgggcgccataatcccagcttatcgggaggctgaggtaggagaatcgcttgaacccaggaggtgtgagccaagattgtgcccttgcattccagcctgggtgacaaagcgagactccatctctaaataaataaataataaaataatgtccattaatgcaccacctaaaaatcgggtgccaccactggtgtgcgccccagactttcaggcactgccgagttggtgttgggtagggtgctgagagtttaggatctgagttgttttacaaggccaagggcactctgcagggtggtggaggctattcagcacacgacccagccagcacagcagtaactcgctgatacatttccaagtgtaaatcttctttagttgtaaacatttttttgagttttcagaattctttgagttcccttggatgcctgttatgaacaccagcccatggaagcagtgttcttagaccaaagatatgaggatcgatggatcccactgtcctacctggggtagaggtgtttgtaggggaaggaccagctctccggcaggctgagttagtgcagtgaggctcagctcactgcagcctcsacctcctggtttaggtttgagattagttacaccagctcatctcaagccctggtttgtgcttcgtcccacagatcggcctgttcgacttggaagtgaactgcctcaccaagatcctctttggtgccctggtggtggtctcgctggtcatggttgcccttcagcactttgcaggccgttggtacctgcagatcatccgcttcctcctcttgttttccaacatcatccccattaggtaagcaggcgacgagcttgagtttggctgccgtgacrtcttcttctctttactcattcaaagatgatggttctgtggcttttattattattattgttttctgagatggagttttgctcttgttgcccaggctggagggcagtggcgcgatcttggctcactgcaacctccacctcccaggttcaagtgattctcccgtctcagcctcctaagtagctgggattacaggcatgcaccaccatgcctggctaatttttgtatttttagtaaagatggggtttcaccatgtttkccaggcttgtcttgaactcctgacctcaggtgatctacctgactcagcctcccaaggtactgggattgtaggtgtgagccaccgcgcccatcggcttttagaaggagcagatctctttgtagagtgaggaccaagagcaatcagtcaggagtgtgaaccacactgaggctctagcaccagaagatcacattcctccacaagccatcctttcttgaatcagagatctttccttgccttgcctccctatgctagggatgccatttagagctcctgtcatcagccagctctgcaaggttgatagtggctgttgggactgctgtgttgagaaggattttgagcctgcatctgggctyaaagggaaatggtgttgtgattgacagcagtgtctgctgtaggtgtgcaatgaaagcttggtggcacatgccagtcctttgcctacctgatttggaggttgartaaatggttatttatttatttatttatttttgagatggagtcttgctctgtcgcccaggctggagtgcagtggtgcgatctcagctcactgcagcctccacctcctgggttcaagtgattctcctgcctcagcctcctgagtagctggaattataggctcctgccaccacgcttggctaatttttgtatttttagtagagttggggtttcaccatgttggccaggctggtctggaactcctgacctcaagtgatccacccgcckcagcttcccaaagtgctggggttacaggcgtgagctactgcacctggcctggttttttaaagtgatataaataatagattttcatagtagaaaaaagtgaaggcctgtattagcaaaagaataaaatataaatcacctctgctctcactaccaagtgataatcattgttaatagtwtgggatatacttttttctagagtgcttttgattttagaaaaaggggagtttggtctactaaaatctgcctttacaaaaaattggagcagtgttttgaataacttttcacatcacttgtatgtgtgtcccatcattttttagagctgctctgtgatgtgggttagcagtctactttcccccatattgttctgtttgcttctactttttccccatgataattagtaaatattaaattacatattttttccctgaaacttttagtgcttatactctgtcttatacttgatatattatcttatattttgtcttgctattttatatatttagatcatcttggtgagaatttgtctttttctggggacagagattgtcgttttgtgtaaaacagtgtgacagggacagggggactgtgcccaagtcagcatgctctggatggtggattcagaggataaatacatccactttagtgacttgactgctagcaaaacaagtattcaatctaagtgacgtggtagccttcaaagttctacatgtaacatgattaaaaattggtgagtcgactcttcatttgtcccagggctagccagtaaaatggcaagcagtttgattagtttataggatgatgaattaatgtgaagacttctatttactttgtgcagtaaaattaaatttcaaaatgagtataatacatacaatggaatactcttcagccttcaaaaggaaggaaattctaatgcaccttacagtgtggatgaaccttgagaacgttatgctaagcaaaataagccagaaaaataagcccccccaaaagtcagaaaaagtgtatgattcaacttacatgcagtgtctaaggtagttaaattccggccaggcgtggtggctcacgtctgtagtcccagcactttgggaggccaagacgggtggatcacttgagcccaggagtttgagaccagcctgggcaacatggtgaaaccccatctctactaaaaatacaaaaaattagcccggcgtggtggcacacacctgtaatcccatctactctggaggctgaggtgtgagaatcgtttgaacccgggaggcaaaggttgtggtgagctgaaatagcaccactgcactccagcctgaacaacagagtgagacttcgtctcaaaaaaaaaaaartagtcaaattcatagaaatgtaagtagagtgctggttgccaggggctgccagggctagggttggtgggggatggggcgttattgttgaatgggtgtggaatttcagtttgggaagatgaaagaattacggaggtggatgatgctgatggctgataacattgtaaatgtgctcagtactatagaatggtcaatttcctgttatgtatattttaccacaattaaaaaaatgaatatagcatcaaaaatatattagcttaagggatcagtaatttttctaaaaggtgagatggaaaccactaccctttctgtattttaagtgacttcagtccataacatgagctttgtgacaataatggatttgttccgtgtgtgacttgacggtggtgctggctcttgctgagtctgtgcgttcagctcyggcagtgtgcttctgcagggagtgagtccggatgcgatggcacatgtgtttagagtccatgtttttataaagatacaaggagccttacatctgtcctgttagcctgtttgctctggttttgtgcctagtttgcgygtgaacctggacatgggcaagatcgtgtacagctgggtgattcgaagggactcraaaatccccgggaccgtggttcgctccagcacgattcctgagcagctgggcaggatttcgtacttactcacagacaagacaggtgagctgctttctgggacctgcgcaggattcctggtgagagaagatgcctgagggctttggctgaaattcttgggctctctctggacatatgagagatgygtgttgctgctattttattcccttcatcttttgatgaagattctttggtgatgaagatgatgataacagaattatgtgcagaatacaattctggggagtttcagtgcggtcactccttcagtcctcacctgaaccttgtgagttaggtagygtttctgtcccscttccacagatgaggaaatgtggcccagagagggtaagtgacttgtcacgggcgcatagtagccgaagcaagctttaactcaggcagtcaggcctgatctctgaccacaccctgatactgctacacaacttaatgcttgtccaggcattaggctatcagagtggtgaagagcaaggattgggagggggaagatctggtttcagcctcatctctactgcttaatgtccatggggtagaagggaagctaatgcaaagatcctgggcggctcaccaaatcagagaaaaatgaggtttctggaaggagagccaccaggaaagttctggttaagtcagcattaggaccctccaggtggtctctgtagggctctgccattagggatgtatctttctactcaagggtcagaatccttcgagatagaatctgattgctctagtgtatgtcatttgtcaccctcttggccaacggaatgggccaggcccctgattgacagtcctcttgggccaccttaggtaatgggcatggtgtggttaatttcccctgggaaagctaggaagccattttcaaaaggggaatgggattctaggcaggcaaaatgctgcaggtgtcttccccagcagggacagtactgactgcagtgtgtgacatagggcaaactctccaaagatggcagctgtcattactgttaataataacaaacatcctgagagacaggccggccactcatttgtcttgtgttttaggcactcttacccagaacgagatgattttcaaacggctccatctcggaacagtagcctacggcctcgactcaatggacgaagtacaaagccacattttcagcatttacacccaggtaaagccttccatttcaacacccaaaacaattctttgactttttttttttaacagctatattgagatgtaattcacaataccgtacaattcacccatttcaagagtacaattcattgtttttttttaagcatattcagagttgagcaactgtcactgcaatcgattttatgtttaccccaaaaagaagccctctacccatcagcagtcactcccyaatacctcccttctatacccatgacacccacacttcctttacactttgaataaaattgcatttggggtccttccccrtcttccctatcttcagggctaatctgctctgctgaagtgctgatggacattaggaaaaacctgtgagaaaattatatgcccaataaatagaaccagaaggaayctgctggttgattatacttcaagtttacgaccacgttgatgttttccctttccctggctatgacccggagcaccaataacaaatggtctgcttgtgaaataatcatgacgttaytgattacctttagtttctcatctacattcaactcaacaatcacgaggaagaaattagttcatcagagatracttgcagtttatctgttcctacctttatttttcctaccaagtttcccaaaaccagtcacttttcagagaaagtattactggcaaatatcctaatatycctaaagtgttagaccggtgggtccccatcttggctgtgtgtcagaattgctggtggagtttcaaaacaacacagaacaaaaacgagacatttatttgggcttgataccctggagattcttactcattaagacttagggcagggcgtggctttgggttttaaaagtaagacaaacacaccccttgctaattctgaggcacatccaaggctgagccagaccgcgttagaccagctccatgttgcagcacttgtttggagataacaagagaataaggaggtcatattttgcttaaattcgtcgaaatagagaacattcccatagtcagaagaccagtaagaaatatgaatgaattatctctgtatacaggttaaaggcagmatccctgaatacttcttgatacggtcataaytgacatttaattttctggaacatttgtcagtgggctggatttccaggctgtctcctgaaaatggcagagcaggggacagtgtgacagtgggagtggatgttaagttagaacagctgacttgacacagttcttgtcatcatctacaaccagcaacaaagcccttgttgctgttccaggctccatggggaggcgtcatggctggtctccaaatggatccatggacctttttcaaagatgtactttagcactattaagaaatcacgaggaacttccctggacagggaggatgagccgcacagcccccgtttcctttctgtctctttgaccgtcttcctctgtgtggtgatttggggttggtgtctctggggctcggtgctggactctgttatgttgttccccggatggcccctcaccctgcttccatcgctctgtggatgctgatggctctgtctccatctccatctctaggcctgacctggagctttggattataacgtagccgaatgtttggcattgctgcatgtggctcataaggatgctgtacctgggacccctcctgactttcttccctcatcycctaaacctattctctcccagggctgcttgtcttagtgcacaccacgccctccatcctggtaccctcgtcaccccagctgacagccactgccccttctccagtacctgctcccacccgatcactagatcaccccttcggccttttttttttttttccttctccctttcttcccttcctttccttaccctccctcccctcccccagcccctcgcccactcccagcccttccgcccccccccccccccacctcccttccttcttttgtaacagggtctcactctgtcacccaggctggagtgcagtggtgcaatcacagctcactgcagcctcaaacttctgggctcaagcaatcctcccatctcagcctcccaagtagctcggactacaagtgtgcactgggtatgcaccaccacacctggctaatttggtttattttttatagagacgaggtctcactgtgttgcccaggctggacttgaactcctgggctcaagtgatcgcctcacctcccaaaggcttcccaaagtgttgggattacaggcatgatgcactgcgcccagccacctttggccttttgtcttcatcccttctcactcactcagcaaggtgacccccttcctcgcctgtctgccgtgaccccctgcacagtagctgcccggctttccttcttgctgtcctctcaggagcctctcggtaccatcagctctgtggtggagtctgagacttgcagtgggatctagccttggtcttcatcccctcccctttcccatgtttcagccttccaggcagggtgagctgccttatttctgtgtctcaaattagacccttccctcggagccaccaaccccaaatgcccaccaggctccttcttggggggctcattgattggattgtcatgcatatcagcacccagctacatgtctgtatcactcgcagccccttctcagtcgtgttgactcttgatggttatattagacagcttcacaggtggtggtgtgtacatccggtgggagttacacccatgccatgttgctggtatttttaagagctcctggtgtttacggaagccgtcccctctcaggatatttgtgtattttagcttttatggttcatttttggcttagcacagataacactctttgtaaagtgttgaaattcagaaaaccacacttcttaccgtgaacctcacctcatactccttccttaggggaagctcataaatcagtttgcccatcccggccttgagtctgacacagctgtgtgttgtggggttagggttagctgtgcgaggctggggtgarctcacaattccagtacagatctacccaagtgagagtgtgtgcatctttctctcgtgatgtctaaacatcctggcataagcacaggaccacgtgtgtgatgggacatatggaagcttttgcatgcttttttaaaaccagttttatcgagggatgatttacatacctgaaagttcagccatgttgaatacacagtgtggtgactttagtaaatttgcagctgtggaaccatcccaaatatgcacatcacccctgctcccactgcagtcacgcctcccaccttagagcttcgtaaggggttcttataccagtggttctttcttctttttctttctttcttttttttttttttttragacacagtctcactctgttgcccaggctgaggtacaggggtgcgatctcggctcactgcaacctccacctcccgggttcaagcaattctctgcctcagccttcctagtagctgggattacaggcacctgccaccacgcccggctaatttttatatttttagtagagacggggtttcaccrtgttggcctggctggtctcaaactcctgacctcaggtgatctgtccgccttggcttcccaaagtgctgggattacagacgtgagtcaccatgcctggcccagtgtttcgtaaagtacagcctttggaacccctgggctagatcacttgggccagagtcaggagcacaaggagtggtgcccagacctgcagttttaacaggtgaaccaggtgtttccagagtacagtagcattggagaacagctgctgtgaaactgaggttcatccctgttcagagcatgggtatctaaacctgtggactccaaggaagagtttgcaagatgacccactggggtacaggaagcgmctctttacatttcagttccatctccaaaattaatgcaaaattaaaatcttactaatactattgaggttgacccaggggccctcactccatgtatcagacaggtacttgtcaggtccggtccttgaggtgtcctgcggaaggggctggaattccacagttgtttattttcccagtgttgaaatgtaggccgcagtttatgagtgtccaggtgacttgttctaaggatgtggttgaactaaactggactcataaagagagcaggtggttttaaaagattcctgcaggaaagcttcagattrttaatacaaggccaagtaaacagtaagaaaatggccaacacattaggagagaaaactataaccagctaaggacttgtgatgrtttttcccctgggttattcatttactrgtacttttttttkttttttttgagacgaagtctcactctgtcgccccatcctggagtgtagtggtgctatcttggcttaccacaaactctgcctcccgggttcaagagattctcctgcctcagcctcccgagtagctgggatcacaggcatgtgccaacacacctggctaattttttttttgtatttttggtagagacggggtttcaccatgttggccaggctggcctcgaactcctgatttcagatgatctgcctgcctcggcctcccaaagtgctgggattacaggcttgaaccaccacgcctggcaatttactagtacttttaatggaaaaaggrgatacaatttaaaaaccataaaatttgctcttttaagcatatgattctgtagtttttaatatgttcacaatactgtgcaaacattggtactgtctaattttagaacatttttatcamccctaaaaagaaagcccacatcccttgagttcccaaacccccctgctctatccccccagctgtcagtctactttctgtctctggatttgcctattctgaacattgcctataaatagaatcaaacaatatgtgaccttttgtgtctggccggtcttccgtttagcagagtatttgcaaggttcttccggttgtagcaggtgtatgtactttattcctctttgtagctgaataacaggtatgatgatttaaaatttaagtttaggctgggtgtggtggctcacgcctgtaatcccagcactttgggaggccgaggcgggcagatcacgagatcaggagtttgagaccagcctgaccaacatggtgaaaccccgtctctactaaaaatacaaaaaaaaaaaaaaaaattagccgggggtggtggcgggcacctgtaatcccagctactcaggaggctgaggcagaagaatagcttgaacccggcaggtggaggttgaagtgagctgagatcgcgtcactgcactccaacctgggtgacagagggagactcctctcaaaaggaaaaaaaaaagaaatttaagtttaaatctataattctcagtgttccttaccccaagtatatgttattttgagatattagctaattgtgtgagaaatgctatttttcattttgttttcttatttatttttatttttatttttttgagacagagtcttatactctcttacccagactacrgtgcagtggtgccatcacagctcacwgtagccttgacccctcaggctcaggtgatcttcccaccccagcctcccaagtagctgggaccacaggcatgcgtcaccatacctggctaatttttgtattttttgtagagagagggggtgttaccatttkcccaggctggtctcgaactcctgggctccagcaattagcccacctcagcctctcaaagtgctgggattacaggcatgagccactgcagccagccctgtttttcatttttatcataggattttagaattttttttcttgttttgtaatgttcagtagtacaatacaatatttatacaaagatcaatatatatagatggaaggtacttgraaaacttttcctgctgggcgtggtagctcatgcctgtaatcccagctactctggaggctgaggcaggagacttgcttgaacccaggaggtagaggttgcagtgagctgagatcatgccactgcacccagyctggrtgacagagcaagacagtctcaaaccataattgggattattccacatactttggtctgtgaactgtcatttttcatttactgagttgttttttttatgagcgtgtgagtttgtgatttatttttctacacacaacatatatacacaggatgcactcagttcatcagtactgactgccagagagcgttcttcttactttctgcatccacagaaaacagatacaaagttcagtttatgttctcttgtttttttttttttttttctgagacggagtctcgctctgtttcccaggctggagtgcagtggcgcgatctccgctcactgcaagctccacctccygggttcacgccattctcttgcctcagcctcccaagtagctgggattacaggcgcctaccaccatgcccagctaattttttgtatttttggtagagatggggtttcaccatgttagccaggatggtcttgatctcctgacctcgtgatccgcccgcctcggcctcccaaagtgctgggattacaggtgtgagccaccgagtttacattctcttgaggaagaattttttttgtcagtgtggttttctctgggacatggagcctacttcattttttactcattgaaaaaactttctggtatttatgaaagttttttttgcagaaaaaataaatcatacggccaagcacaaagacaaaacattgaattcacctgtattcatatcattcggcagtaaccagtattaacacctgggtggacaaaacgccaaatgctctgcctttgtgtgtctggatagatgcgttctttatttctctctgtctctgttttcttttcaatgagaacccatcatattcctttcttttttaactagagttgaccaccagaattgcctgtaaagttttaaaaatataaatataaatatatgcctgggctgtacggcattctttgggtctggatcttaagtatgtatattttaaaaatgtttttttttgagatggagttttcgatcttgttgcccaggctggagtgcagtggtgtgatcttggctcactgcaacctctgcctcgtgggttcaagcgattcttctgcctcagcttcctgagtagctgggattacaggtgcctgccaccatgccagctaatttttgtatttttagtagagacggggtttcaccatgttggccaggctgatctcgaactcctgacctcaggtgatccgcccgcctcagcctcccaaagtgctgggattacaggtgtgagccactgtgcccggcgtgtatattttaaaaaatctttattggttattctgagaagccttcctggttaagaaccactgccagaataacactatttaacttccttcttttcactcatgtcaaggtttttaatggtttcataacacagtccagactagagtaagacaagtgaggaactcacatagcaaatttaaccgggtgccaaaaaaaaaataaataaagcaaatcatactttggtgaaaaaaaattttttttttttttttgagacagagtcttgctctgttaaccaggctggagtgcagtggcgtgatctcagctcactgcaacctctgcctcccaggttcaagcaattctcctgcctcagcctgccgagtagctgggattacaggcacctgccaccacgcccagctaatttttgtatctttagtagagactgggtttcactctgttggccaggctggtctcgagctcccgacctcaggcgatccactcgtcttcccccaaagtgctgggattacaggcgtgagccaccacacctggcgcagtgcaatattttaaaaactcaagcgcaaaacattcgtgaagaacagtatattgaaattttaaatgaaggcaagatccaaccttgtgctagcacagttcagttgcgctaactcaccctggtcctaagccctggatttatagtttcagtggctgtcaggcttctcattattggggctggattattctttgtcatgggaggctgtcctgtgccttgtaggaggttaagcagcatgctacagatttctatagtacccctgtcccctcacagttgtgacaaccaattatgtctccagayatgaccaaatgagggtcaaaatcatccaagttgagaatgatgatgatatatgggtacatttaaatttattgactttgtgttgcagatgatgtctgctctaaaacagtaaacattggatttacttagtcacttaatcagcctgtggctcagctgattcatttggaggtagtagctctgakcctgtctctttgatggtggccctttgaggtgartgagtcatcagctctgagcttttttgatgtggcaggttagttagggttatcataacagaaattctttatctttaatagtgtatttctgrctgggtgcagtggctcacacctataatcccagcactttgggaggccgaggcgggaggttgacttgagcctgggagttagaaaacagcctgggcaataagagggagaccttgtctctaccaaaaaaaaaaaaaaaaaaaaaaagctgggcatggtggtgcacgcctgtggtcccggtattcagaaggctgaggtgggaggattacttgagcccagaaggttgaggctgcagtgagctgtgatcatgcctcttcactccagcctgggcaacagagtgagaccctgtctcaaaaaaaaaaaaaagtgtatttcagtcaattgcaacccattcctaatatccattaatagtatgaatgcccatatgtggtgaagttttaactgcatttggaaagaaaactggcattcctggtgactcaacgtttaatttttgtattaatcttttctgtaataacaggctggagttcttgtcaggaaatggccctagctgtggattactaatgggaaagggaagcctattttccytgccttggtgtctcatttattggctgggatgctataaatgactcaggggctttataggattcgagacacccgcccaggggcccaagtcagggccctttgtatttggagatcttaattcctctcccaatagtgacctgtgcttggttctgaagtcacttctgacctcgtgtggagctgttctgccctccctccctccataaggggaccagtggtttttccccagggcaaaaagagtcataacctgcctctgtggatgccacatctgtttttgttttcccctggtattttttaagtaagaagaaatgtgtrtaggttaaagggcctatggggaggaggttagagataaacactgtacaatgtgaaactcttccatatggggaatgtgaggatgtttgaaggccaggcctaagacaggcatcatccaaacacagcccctggtcagtttcagtgccttaaggatgtatgcgcatgaccatttggtgtgcaaatgagactttatttaacaattaaaagaagcagtttcagcaccaatgagtatttcctctccttcctggaacattttagtaggaaaggtgggaaagtattaatttaagagagaaagatatgtgggtggaggcattgaacctgtggcctgtgatgttggtcaggctatcatagtagtcttctaattcattcgttgtcagatggtctcctgagtgaggcctttgtcaacatctgaccgtctgtggttctctttttgccttgcttgggaattgtttcacctggaatacaaaatcccatggctctgtgttatcccatgtttgaaatattagtggaagcatttgacttttgtagatatgaaagcagattgctttacaaaatccagaagttcatgaaggatgccctcagtacagcttttcatttaaatccgtggatactgaaacttgccaaccacagtaattactttgtcaaaggtcttgttattgcgcctaatgttaaataacgatttggtccaggtgctgaggaatgcggacagaaatgaagacacgtgttcgtggctagaacctaaattatagaattttttaaaaaaagggttctcgatttagtctctccaatagagaacctttctgtaaatcttttctttataattttagagttaaattctttataattaaaagcactcggcaaataatgattcatttaaaccggagttctgattcattactctaattattgttaccatgcagtgccctttggcctggaagtgaaactcgtgtgctcctgacaccagaggttaacagagcaggaaggcagagcgctgtgtccccgcagtgaccagaataatttagtaattgtctaattacctgaggagtctaatgctamtactaaaaatagtattaaaaaattaagtgaaagtcattttcttgtttcttgtaacccatctgttctctattttgggcaatcgggtgtcatgggtgtaaagtgcgactcattttaaaggatcagatcacttctctcctgttggataaatatgtttttaatagaatgtagaatctggtaactccatacacatttctagcctccacaattcagttrgctgtggattcagtaagactgttgtaggtgaccccttgtctaaatctgtgatttaaaatctgaaactgatgtcgatttcatagttgttacttcttgaaaatgaaaaaaaatgcatgtcaattgaggactccctaccaccaccttgggactattaagttattaatttaattgttcagcaaatatctgttacataccagacactgccctggatactagraatacagtgatgagtaactcactcaggtgagccttctgtttctatggtctaatgagagggaaccgtcaggtaaataggccaatttagacaatgaagagagtaacacacagggtgttgccaaaatgtgacttgcaacgggaaggcaagtggagtgccatgaactggggggcccaggaagagcctctttgaggaggtaaagttgaattgaggcctgaatgatgagactgagcaagccagccctgcagtgagctgggggatggggttccaggcagagggcacagcaagtgcagaggccctcaggcaggaagaagcttggcagtgcccaaagaacagaaaggccagcatggctggagcagagggaacgggaggaagatggcatgagggacagctggagatgcaggcaggtgytgatcagatgcgagggcatttggcttgtgttcaacaatgagccttcccccccccccccccgccagtggtcttaattttcattatattctaaagcagtagaaccctttcttcaaaggaagcctaggtgggggtcgggcacggtggctcacacctgtaatcccggcactttgggaggccgaggcaggcggatcgcttgaggtcaggagttcgagaccagcctggccaacatggtgaaaccccatctctactaaaaatacaagaattagcagggcttggtggcgggcgcctgtaatgccagctactcgggaggctgaggcaggagaatcacttgaacccaggaggcggagattgcagtgagctgagatcatgccactgcactccagcctgggtgacagagtgagactcatgtctcaaaaaaaaaaaaaaaaaaaaggaagcataggtggcacccgatgtgtgacagaggaacggagctgcaggctgcatctcccatcctgctgcagttggtggtgctgagcgggtttctcaggattcctggggctcagtgtggagcatggattgaaaaccacctctagttcactcctctcctgcctcagcctcccgagtagctgggattacagtgccaccacacccagctaatttttgtatttttgtagagacagggttttaccatgttcggcaggctggtcttgaactcctgacctcaagtgatccacccgccttggcctcccaaagtgctggtattacaggcgtgagccaccgtgcccggccactcctctcgttgacaggaaacagcctcagaggacagacaccacttgctgcaggtgtcctagctgcttgccacccatccaagaataaggcttagctttggttacccttcagtgctctttttaccatgttgctcaaaaccatttttccaagacttaacccattcctggcctttcaggggctgagctgtgttgccagttggaaaggaagggatggagaaggccagttgtatgccatggagctgcctctcaggcaagagctggggtctaaagtcagcctgcaaggcaaaacttgagcacagttaccattacacccgaaagtctagcttcagtggggagccaggtgccgttttgcagtgagtcccatccggccaaggtttcctctggctgttcctgacgccttgctggactgccctggattgcttgttgctgatggttgttacttgcatayggtaccagatgaggttgttgccttctgttgtaaaccaagaagattgtgagcttaaacagtggttctaagccgagggtgattttggcctctrttggacatttggtgacatatcttgtcacaactaggggagtgctgctggcgtccagcgcatctggtggctggaggacagggatgctgctgaacaccctatataatgtcccccaacataggagtacccaagtggggaagccctgctctgaactaccgggatccctttcagtgcagtggggtcctcattctgtcaraagcccccgacaccaccccagggaggatagattcactcaatctgcaggtagaatcgttctcgttcattaaattgtattttttttcctctgtctctttttcttttttttttgccgagcataaatgacaaaccctgaaaattgcatgtcatttatttgcagcatcattgtagatatatctaagggttctgtgtgttggaacagtagaaaaaagaaacaatagctgcacggctgttcttccactctccaaatcattcctgcytctggtcatcttccttgttcatttctccttcctgtagcaatcccaggacccaccggctcagaagggcccaacgctcaccactaaggtccggcggaccatgagcagccgcgtgcacgaagccgtgaaggccatcgcgctctgccacaacgtgactcccgtgtatgagtccaacggtgtgactgatcaggctgaggcygagaagcagtacgaagactcctgccgcgtataccaggcatcyagccccgatgaggtaaacctgggcaggtgcagcaaggcatggggaggccctgcttgttttctctgtgctggaattaggcgttttctaaggaagcaatgtgtcagggcagacaggagccaggatgatgcagggctgctgggaaacacattttcaaatacaagaaagaaacgcctttcctctaaaaagaatagccttggacttgaggtatagtctgaattaggaaagttagagattttgttttgtaactcaaaaggccagcataacagggcacaaggtcccatttaaaccacatactttaaaaaagatgtaaataattaagatcttaattaagatraactccacattccatacagtctacctatttaaagtatgacttttttattttatttttttccccgagatacagtctcactcttttgcccaggctggagtgcagtggcgtgrtctcggctcactacaaccacccactctggggttcgagcgattctcctgcctcagcctcctgaatagctgggattacaggyacccaccaccatgcccggctaattttttgtatttttagtagagatggggtttcaccatgttggccaagctggtcttgaactcctgacctcaggtgatccacyggccttggcctcccacagtgttgggattacaggcgtgagtcactgcgttggtgagtatggcttcttaatatagttagtatattttgggatttttttttttttttgcaaccatcatcacaatcaaattaggatatttttatcaccccaaaggaaattctatacccactttcctgctgtactcccttgtcttcctcattcctccagccctaaagcacccactaatctactttctacctctatagatttgcctatgacagacactccaaacatctggaaccatacaataggtggccttttgtgattggcctgttttacttagtgtgatgttttcaagattcatccatgcatattcactcatcaatgcttcattcctttttatcactgaataataatctgtttatggatatattacattttatttatccattcatcaattaatgcacatttggatttttttttttgtctatatagataatgctgctatggacaattgtgtacaagtatttgagtgggtgtagatttctgtttctcttgggtatatacctaggagtgggttggcaatgtcatatggtgactctatagttaaccttttgaggagctgtctgtctgttttccaaaagtggctgcgctattttacgtatctaccagcaacgtatgacagtttccgtttctccacatctcggtcaatccttgttactgtyagttgtttggattctggacgttctagtcagtgtggagcggtatctcattgtggttttgatttgtattttccggatggcccctgatgttgagcgtcttttcgtatgcttattggccatttgtttatcttctttggaaaaatgtctatccatatcctttatccattttcactttgtctgtttttctttttgttgttgaggtgttgtttgtttgtttttgttttgctctgtcactcaggttggagtgcagtggcacgatcttcccggctccatctcccagagtgctgggattttaggtgtgagccacagygcccggccacctttcaatatcttttaatttactttttaaaacgtgaattttcctattgatatagtttgtatcctccttttttcacttactattttatcatttctgttttctaatcatcttgaatattattgaaagcattctttaagaattgctacctatgcatataccctaatatcctaactattctcataattggarcttctcatactgtaggaacttaggttattcctaatttttagcaatgatatttataagtattttgcaatgaacatccttacaccttataattctagaagtggcgtgattgggtttatgaattcaagagatacttttgagtagactaacactgtgatattagtgctaacaagacagccccaggcccctagggaggaggcttgtgtgacacagtatagtgtgtgrcttactccygggatccagctccacacttgggcagttacttatgcttgctgtgcctccagatctgtgccatggaacccccacagtggggctgttgtgaagmcccaagtaggcagtcagtatatcttgtgggtcaaattgaatgagtattttatttttagagatggggtcttgctatgttgcccaggctggagtagtgcagcggctcttgataggtgcaatcatggctcactgcagccctgaactcgtgggtatgagccatcctcccacctcagcctcctgagtagtcaggactacaggcgtgtgccaccatgcccggctttaaatgagcataaggctcatggtaactatggccagagtgcttcccrgaatttttttttttttttaaacatttaactcttgtaccaacattgggaggaatcccaattttttttttaacccattttaggaagaatggggctcctaaagttctggaccaatttgcaagtatcagtgagcctgcggttcctggcggttgggggatggcacaatgaacatctttcccaaagttcacaaatggaagaacgcttgagtgtcatcttctgtgtcctggtgcttctttctcccttttttgggcagtggaatttgtcacctgggagactcctccttccagcctgcagggtgtttgtggaatagctcaagctataaaacccagttcatccgtgactgttgacatttgaaccaggctttttaggagtgaaaaatgttgyacacccstggctaccttctgagatgggaattgtgtgcagaaagagagagggggagggagggtaggtttgggtgattgtcctgatctacttggacttgtgccatagtaagtgacaatttcaggtttatcatcatttcttctttctgtggcttggcaggtttagtctgtttttccctttgggaatgatactgtggaatagcgatgtcagagagggccatatttttggtagctatggacttggaaccagtaacctgtgggtatttgatggaattcaaatttattttattttatttgagctcctgacctcaagtgatccttcagcctcccatagtgctgggactacaggcgtgagccaccgtgccaggccttttttttttgctctgtcgcccaggctggagtgcagtggtatgatctcggctcactgcaacctccaccttccgggttcaagcgattctcatgcctcagcttcccaagtagttgggattacagaagtgcgccaccatgcctggcaaatttttgtatttttagtagagacagggttttccccatgttagccaggctggtctcaaactcctgagcttaagtgatctctctgcctcagcctcctaaagtgctggggttacaggcgtaaccaccgcacccagcggaattcaaatttgagcaagctccagatgctgatgatctgagaagcaagtcctgcctgaggcccctgatgctcctgttggcatctctggaggctttaatgcccgttgcccactcctctgctcccactggactttggtgtatttgttttagggctgtgcaaagatttttccatgaggataaatctttcatggaatgctttgcacttctcggccgctttttctcaaagtgaatggtactttatctcttctgtggatgaattgcacttgaaatcagatttgtcttgtttttctaagattctgaatcatgattgagaaaaaaaaaaagaactactttcctttggcctttggtgtcttcagaggccagtgttacctttttgctgtggttgtttttttttttgagacggagtcttgctctgtcacccaggctggagtgcagtggcgtgatctcggctcactgcaagctctgcctcccgggttcacaacattcttctgcctcagtctccccagcagctgggactacaggcacacgctgccacgcccggctatttttttttgtatttttagtagagatggggtttcaccgtgttagccaggttggtctcgatctcctgacctcgtgatccgcccgccttggcctcccaaagtgttgggattacaggcgtgagccactgcgactggccttgctgtggttttttttttacaacttttattattttgtattgcacagttattttatgtctatagtagaacacatgaatgcattgatyagaaaagtaaaaagtagcccataatcttactaaaggtatagtcattgttaatgtcttcctgatcagccttctaaaaactacttcagaggccgcctactgccaaatacaaataggtttatataaatgcctcatgaggctcagaggaggctaaatctagttmaggtgaaatctttcagaaagcygtactgtttccaagtccctgtaggattctgcatagacttggctggctctagaatcgtgcctttgaaattcaatatcaataaaacattgctagcctaggcaaggtcagtttatggaacatgtgtagaaaccagtatgcattttacttgrgagctgctggagtaatttctaccagttggcgtaggattcatttcctgtaacagaaagcaggatttcctaaatttgtttcctgtgcacattccagttggggaaccttgaagtgtctttattcagctatcgattacagcctgggggcgctgggccctccctgccaccgtacagtaagtcacrgaggaaatgaaatagatacagtcggacccggaggagcggagcactgctcagatgctggagcgagcaggcctcagccctgacagcatcccaccatttccaggatgttccacagtgtcgagagtgggtggtggggagtggcagtgggggccttggtgataatgcaactttccaagcctttgtttcttggtttgagccaggaggtgctgtcctgtaagcagctaggatcagctctgtccatggctcattcacttgtcttttccatgaatttttcatatttaaaaaactttttttctttttttggccaggcgcttttgagacagagtcttgctctgtcgcccagtggtgtgatcttggctcactgcaatctccgcctcccgggttcaaaccattcttctgcctcagcctcctgagtagctgggactacaggtgcccaccaccatgcctggttaatttttatatttttagtagagacagggtttcaccatgctggccaggctggtctcaaactcctaacctcaaatgatccactcacctcagcctcccaaagtgctaggattacaagcgtgagccaccactcctggccaaaaaaggttttaaaatcacaagtactaatgtcttcactacagaaaagggagaaattgtagaatcaaaaagaagataaaaaataacctgtgattcttgccacctggcgataactactactgtttatgttctggtatagattttctcagactccttctaaatgtatgcatatttaaatatacatatatatttattttattttatgtgtatttatataatatatgatatgcatatttataatatgtaaatatttacatattataaatatdtaaagattataatatatatatatgtaaatatatattatataatatatwatgtaaatatatattatataatatattatgtaaatatatattatataatatattatgtaaatatatattatataatatattatgtaaatatatattatgtaaataataatttaaatattgacataatatataaatatataaaataatatttactttgtgtgtgtgtgtgtatatatatatatggagagagagagagaggaccagtacagaatcatgctgtagtacatataattaaacaggaaggagggtgaattaagtaacttcctttagaaagtcatatggctttccgagattgcaccactgcactcgagcctgggcaacagagcgagactgtctcaaaaaaaaaatttaaaaaaaagaaagtcatatgactttcacatttctgtaggacttacgcttgtgttcaggtatacgtgtgtgtgtgtgtgtgtgtatgtgtgatgtattttcctgtgtgccatgttagtatgtgtgtgcacatggatgcacatgtgtgtgtatgaatgaaagctgcttgctgtatttcactgggtcttgaatagctgaataattccagagcaatgaatcagcagttctaggtaacatgcagagtgtctccatggctagcacatgctcatggcacagagtgagaagcctgttgctctccttccctgacttccattctcccaggcttcttcctctgcgacacccgctgttattaatatctgagtatacttgcagagataattctttgcatgtattagaattaccctcacgcttcattaaaatatatatatattttttattttttatttttttttttgagacggagtctcactctgtcacccaggctggagtgcagtggcaccatctcggctcactgcaacctccgtctcctgggttcaagtgattctcctgcctcggcctcccgagcagctgggactacaggtgcacgccatcaygcccagctaatttttgtatttttagtagagacggggtttcaccatattggccaggctggtctcaaattcctgaccttgtgactcacccaccttggcctcccaaagtgctgagagtacaggcgtgagccaccacacccagcctattaaagtattttttaaaatttaaaagcacaactgtaaattatagatgcagctttacactttgcttttagtagctcagtttttacaaatgtgccaggacatggaatatcattgcactgtgacctcagcgagggctgagttttactgaaacatctgccgtgggttcctgtagcctcccagtggcataaatgcatgtctgtatttcaagaccctgtctactcactttcatggaaggtgagggcatcacattggccttccctgcttctgcagtgcaattgctggccatgtttaacttgtaactttcaattcaatcagctgtgtgattttttttttttttttttgagacggattctcgctctgctgcccaggctggagtgcggtggtacgatcttggctcacttcaacctccgcctcccaggtacaagcaattctcttgcctcayctcccaagtagctgggactacaggcatcyaccaccacgcccggctaattttgaatttttagtagagacagggtttcaccatgttggccaggctggtctcgagctcctgacctcaagtgatctgcccgccttggcctcccacagtgctgggattacaggcgtgaactactgcacccggcctagctgtgcgattttaagcaaatcattgctgcacctcagcctcctcaaaggtaaagagggactagggccattgacytcacaggtccttgctaaagatgaggtagtaatggtgataacagtggtactgayggcagtgagaaatgatcacctattgaatacctgctctgtgccaggccctgggctatgagcccctcttatgatagagtcacaatgattgtgcccattttgtagatgaagtgtaagttggctaaggaaagttcccatggtcgcatagctggcamgattaaaaccagacagcccatgcctagagtctggactatgcaacccacaataccactttcctccccaggggatgatggcttgaaagtgctttgtaaactcctgaagtgctccagagagtgaagatgcctgtgtgtgggagactcagggctgatactggatgaagtaccacagtctctggctatttttagccaaacagggtgccctgtttggaggtaatgttcagacactctgcatcttccaagtgcagtggaatttttattttttatttttattctttggtcccttccctcttttctcatctggggaagcttccgagcttggtgaaaataagcctttttctgccagaccctggcagcctaccttctgagtatcttgcctttaccacccacctcattaggattcatcccttagaaaggaaaattaaaatgagcatgtttcacttagcaacttccagttccacctatgttgctgcaagtcacagaatttctttcttttttaatgtgttttgcttatttttttgagrtaggatcttgctgtattgcccaggctggaatacagtggtgcagtcttggctcactgcagccttgacctcctggcctcaagcrgtcctcccgcctcagccttccaagtagctgggatgagaggcgcacaccaccacacctggataatttttgtattttattgtagcaatgggggtcttgctatgttgaccaggccaatctcaaactccaaactcaagcaactgtcctgcctcagcctcccagagtgctggaattacaggcrtaagcactgcattgggccaataagaggwtttttaatggctatacaatattcttctgcgtacgtacaccacagagtatttgttctatctcccaagcttaccacttaggaggtttcccccttttggctatcataaatcatgccacgatgcattgccttccaccttctctctgcacatctttgaccatgtgtgtaaaaggtcccgtttgtctccttttgcctcgtcttaatcttgttgctgaacgtgagtgtaaaacctgctggagagctcaagtacatggtgccggggagggcaggcaatctcgcggtccttctgcggctacgaggttggttggtttgtttttttatgagcacattcttggtgaaccataagatgtatgcagttcccctccatgcctgggtatagcctgagcctcagcctcaggtccagacaatgacagcattcagatgtgtgcatgaatgagctyggagtgtgaagcagaaagatttaggagggtgttggagttttaccaccacgttgccatgaccttggacccaaggggtaaggtcaaagaacagaggttaggaactataggggaattcttccatcagtattattgattaaccaccgaagtggggtctcaaaacaggattgtggttgttcagaagaagacagcgggggctgtttgagcagggctggacagtgttttacagacactgtaggaaactgtcagatgtgcctcccttggtgttagcttatccatgggccatagaggcaaaagctctgtcccatgtgatattagtgttggctcagaatagagttaatatatagtcatttcttttttttttctttttcttttttgagacagagtctcgctctgctacccaggctggagtgcaaaggtgcaatcttggctcactgcaacctccgcctcctgggttccagctattctcctgccttagcctcctgggtagctgggactataggcatatgccaccatgcctggctaattttgtatttttagtttatttgtttgttttgrgatgaagtcttgctctgttgctcaggctggagtacagtgccacaatctcagctcactgcaacctccgcctcccgggtttaagggattctcctgcctcagcctcccgagtagctgggattacaggtgtgtgccaccacgcctggctaatttttttgtrtttttagtagagacagggtttcaccatgttggctaggctggtcttgaactccttacctcaagtgatccaccatccttggccccacaaagtgctgrgattacaggcatgagccaccgtgcccggtctataaatartcatttcttaatgatcacattttaggaagatgatgctgttctttcttcttaagtatttatttttatcagtcaagtgataggaagttcaatttcaagtacaagacatttggatcaagaagtgactattatttatttatttgagatggagtcttgctctgttgcccaagctggagtgcagtggtgtgatctcagctcactgcaacttcctcctcctgggttcaagcaattmcgctgcctcagcctcccgagtagctggaattacaggcacccaccggcccagtgaattttttgcacttttttttagtagagatgggttttcactatgttggccaggctggtcttgaggctccatacctcaggtgatccgcccacttcagcctcccaaggtgttgggattacaggcgtgagccactgcgccyggcaagaagtgaccttttatgccactgtctcttccgctgattcctagcaggctgtgttttgtttgtttcatgctatgttaaaaaaaaaaattgaagcagtatttaaaaatcacttgattttatgtcaaaattagtttttctcaagaaagatcaggtctggaaatagtaggcccaacttctacctggcagtggttggccaagctgggcagctgctgcctcagttttcttctgacccccacatggccctgccctatgcctgtctgcttctctcccaacgcctgtcggcatttgaacctgcaaccactgcctggtgcatttgaatgtattttcgtattgagtgaagaaaaccgtgtgtctgtggatagatttataattttgaaaggctggattagggctgaccggtgactctttgtgagcttaagtatttatcttattgaatgccaccaaataaccccttttatcagatgtcacattcccgcctcgtatcatacgtgctctgatgattggtatgtatcctgcttttgacaagaattcaaggctactgagcgtgatctggcttatttcccaagcacagcatcccaggtacaaagagaaaactttaaaaacttgtcacargtggtttattgctggccaagaaatgatgaaaaagccctttcacggatggtttctggcctgagtccctcacatgggcatttgaggcagggaaaggtgtgggctctgcccctttggtttcttgtcacccaaaggagaaaacacaacagactcctgagacaggatcccctccccgccctttctacctttccagcattttatccagctcgcgtctaatgtatctgttcattcatccaccttaacgaggttgtgttttctgctgctggcctgacctgcagttattgagaccctaactcaggctgttaacagcagtgagatgcaagcccctgaaatcctctatcttgtgtgttacggggtgatttctttgaacagaagccagaatgttaagtaaccttgttgtatatcactttgttttgggagggaatgcagttatctcagctcactccccagatgtttgtctggcccacaatcgagaggtgttagtgagtaccccacttctaaactggtcctccctgagtaggactctgggggatgttatgtgtcctgttagaaagtagctttaaattaacactgacttaagctaaaatggaggagagtggaaggggagaaggaaagacttcctgcagggctcagatcctgttggaatcagctcccaaagagactgagaacgttcttgttttttttttgtttgtttgtttttgtttgtttgtttgtttgttttgagacggagtctcactctgtcgcccaggcgcgatcttggctcactgcaaactccacctcccgggttcacgccattctcctgcctcagcctcccgagtagctgggattataggtgcctgccaccacgctctgctaatttttgtatctttagtagagacagggtttcaccatgttggccaggctggtctcaaactcctgacctcaggtgatctgcctgccttggcttcccaaagtgctgggattacaggtgtgagccacctcgccagatcctgcagaggttttgattaggatggtggatcccaggggtggggaagggctacagatatagctgtcgtaggctcctaagctccactgagaggcttgctctagaagaaagcaaggctaaaagatgtttacatacagctgtaattgatctttcctcaaaagcgtttgtcatttctgatcatttcaggttatagttattcaacgtttccactaacatgaacctgtggggtctgtagctgggcatgctgggctggccgattctgctgcccagccctggaagccacttctggttctggagttacagattctttctcgattaaagttaaaagcaggcttttggggaattagtgtatctcctggaagcccagtatcacagacttttcacatattttcagggcaattaacaggcaaagtaatagctacttgagaataggaataaaaaaatcatttccataagtgtttgaaagtacctgaagaataatttttttttttactttattacttaataggtatataaggaaggatataaatttagtcagggttttttagcttgtacataactaggtatttgtaatatttgaattgtattgggatgtttatttaattaaagttaaacgtaaaagaaatgcgtatacatgtttgaaacatttcggtggtatagaaagctagaagtggccgggcgccatggcccatgcctgtaattccagcactttgggaggccgaggtgggcagatcatgaggtcaggagatcgagaccatcctgactaacatggtgaaacccatctctactaaaaatacaaaaaaaaaaaaaattagccgggtgtggtggcgggcaccagctacttgggaggctgaggcaggagaatggcatgaacccaggaggtggagtttgcagtgagccgagatcgcgccactgcactccaacctgggcaaaagagtgagactccgtctcaaaaaaaaaaaaaaaaaaaaaaagctagaagtaaaagctagaagtaattctctccatgtgtatcactctataaacatttctacactgcacccaagcttttttacatagacagatgggataattttttttcttgtttttatttatttatttatttttgaggcagagtcttgttctgttgctcaggctgaagtgcratggcgccatcccagctcactgcaacctctgcctctggggttcacgcgattctcctgccttagactcccgagtagctgggattacaggcacccgccatcatgcctggctagtttttgtatttttgtagagatggggtttcgctatgttgacctgactggtcttgaactcctgacctcaggtgatcctcctgcctcggcctcccaaagtgctgggattacagacatgagctactgcacctggctggtatgattttatatatgcgaatcattactgatttgttaattttaaactttggaagacaattgttagcagacaaaacagggctatattgaaagttagagtgtcttagtctgtttggcctgctataacatggcctgctataacaaaataccatcaactgggtatcttgtaaacaacagaagttatttctcctagttctggaggctgggaagtcctgtgtcagcatactggcagatttggtgtctggtgagggcctgtttcctggctgataaaaggccctcttttcactctgtctctcrcagcagaaggagcgagggacctctctggggtttctttcataaaggcacwcatccactcatgaggaaccccacccccaggacttaatcacctcccagaggccccatctccaactgctatcatattggggattaggtttcaacataygaattttaggggacataaacatagtctatagcatagccattaaattaaacaaataactaagtgaatgagttttcaaagacttaggcaggccagtagccaaaaactaaaactaaaaaaacacaaaataaaaacagaaaaacccactacttgattggtcctttctttgaaaggtagaggtcagtatgacagtttcttccattggtcaaagctcaaagctcgttagtgctggctgactcattatgacttgaacttaaataagggagagtcttgaaaaataatttcttgctaatgtaaatttagttaatagaagcaacagaaactgaactcgatatctgagcatagtagactaaggatgcataaagatacattttcagagctggagcagaaatgagaaatagtcatctactccaagatctttattttgcagaggcctgtgggggctgggggctggggacagagcggggactggaaccccagttttgagctccagcttgatctcttcttcggggtatagcaggtcagcyaagatgacatccaggggttccagagaaagaaaggactaggggtggagagctgcatacctttgccttgtggcttctgcagagctctcttggtaaaaggaatgggaactcaagaggaacgccaggttttttttttttttttttttttttttggagacagagtctcactcagtcacccaggctagagtgcagtggcatggtytcagcttactgtagcctctgcctcccaggctgaatcaatcttcccatctcagcctctccagtagctgggactacaggtgctcccctagagcctccgcagcaatgcagcaatggtgatcaagcgaccttgatcctgtctcagtgagaccctcatcccatgtccacccctgatctatagaactgtaagaaaatctatttgtttcattttaaaacagatgctggccggtgcggtggcccatggctgtaatcccagcactttgggagggaggttgaagcaggtggatcacttgagatcaggagtttgagaccaatttggccaacatggtgaaatcccatctctattaaaattacaaaaattaggcagatgtgatggcaggtgcctgtaatcccagctacttgggaggctgatgcaggagaattgcttgaacccgggaggtggaggttgcaatgagccgagatcgcaccactgcactccagcctaggtgacagagtgagactccatcacgaaaacaaaacaaaacaaaacaaacaaaaaaaaacagatgcacagtaatttggtacagcaacaacaggaaaggaatacaggagggcttccaacttcaatgccaaacaagctgtcactttattcccatccaagtccaaaggtacagtgtctacaaaaaatcaagaaagaagaaaaggaaggccctcccactttcctctcataaagcttaatctttagggggagtaggggaggcaggttttaggagggtgttgacaggggctgcaggtaggtgatagggagaggggtacttgggaggcatcacctccactggaagtgttttttatctttttttttttttttttgagatggagtttcgctcttgttgcccaaactggagtgcaatggcgcgacctcggctcactgcaacctctgcctcctgggttcaagtgattctcctgcctcagcctccctggtagctgggattacaggcgcctgccaccacgcccagcttattttttattttttttatttttatttttttagtagagatggggtttcactatgttggccaggctggtctcgaactcctgacctcaggtgatccactcacctcagcctcccaaagtgctgagattacaggtgtgagccaccgcgcccggctctattattatgtttttgagacagggtcttactctgtgtccaggtgggagtagtgtggcaccattatggctcactgtagcctccacctcccagatcgtgatcctcccacctcaacctcttgagtaactgagacgacacacatgyaccaccccrccctaataataattttttttttgagatacagtctcgctctgttgtccaggctggagtggggtggtgcgatctctactcactgcaacttctaccttccaggtttaagagattcgcctccctcagcctcctgagtagctgggattacaggcgcatgccaccacctccggctaatttttgtatttttagtagagactggatttcaccatgttgaccaggctagtctcgaactcctgacctcaggtgatctgcctgcctcagcctcccaaagttctgggattacagacatgagccaccaccctaataattaaaaawtttttttttagaaatggggtctccttgtgttacctaggcttgtctcaaactcctgggctcaagtgatcctcctgcgtcaacctccccaagtgctgggattaaaagtgwgagtcacagcagctggccaattgcttacatttaaaagttaggccgtctcggggagaagtctaaatttctgttttttcttgagaaactggaagctccatccaccctggccctagtccctgcagggcagtaactgccacctgtgtgtatagtggcagcagcctcctttggctggggctgggctcctgcttgccacagcccccactcagccctctttgctatttgtatcaacactctggcccctgtcttggagtttgcaaccctcatgcctttgaccttaagctgagtatgtctggctgaggccatgagaaggttctgacttgacacccgtgcgatgactcttggaagggaagagtgtgtgctgtggaactttacaccaggcggatccaggtgccagtctggcctagctttgccacatgccagcgctgtcaccttgggcaacttcattaactgctctgagccttggtttcctcttctgtgtggacccgtgttctccacctcagcactattgacatttggggccagatcagtctctggtgtggtatgtcctgtgtgttacgggacgttttgtagcatccctggcctctgcccactggataccagcattacctccttccagttgtgacaagtacagattcccccagatgttgscgcgggtcccctgggggacagaatcacccagttgagaaccactgaagacactcccccagtgcagtgtgtgaggctgaaaggagagcctgaaggcgaagggctgtgtcagtcagcattctcttccttcttttttttattgtttagcttgttgcagatacttccaggagtgatccgtaattgtgccaattgctccttttttcggagtgggggtggtgtggggtggggacggggacagagtctcgctatgtcacccaggctggagtgcaatggcgtgatctcagctcactgcatctctgcctcctgggttcaagcgattctcctgcctcagcctcctgggtagctgggattacaggtgtccgccaccatgcctgggtaatttttgtatttttagtaaagacggggtttcaccatattggccaggctggtctcgaactcctgacctcaggtgatccacccacctyggcctcccaaagtgctgggattacaggcctgagccactgcacccagtcacaatcactcttaattctgtgccatctctttccgccatgcctctggtgtgcagcctgttttgagcctagaaaagatgaattgtgccttatagaggggcagctttcagtgtgggagccctcatagacccagaggaacagacactgtcatgggccagcacagagcacttggcgtccctaagggcagtgactactgtgattcccctgtctctgagcccccttctgcctttgtgttcatngcacagcctgtgaacccagattctcggctgggcatctgaccttcgaccctgtgttatgtttaggtggccctggtacagtggacggaaagtgtgggcttaaccctggtgggccgagaccagtcttccatgcagctgaggacccctggcgaccagatcctgaacttcaccatcctacagatcttccctttcacctatgaaagcaaacgtatgggcatcatcgtgcgggtgagtcgtttttattcatggcttaaagtgctkaagtaccccaggtgtgctgcgtgtgtccctgtgggttgacattctttctaaccctctttactgtggtatctgtcacccagactaacragggaatataattccctaagcagaaaggaaattagttcattcattggacacaccccgtaactctgatccgcttatggtgtccctggttctggagtgaaagttaaagagaacgtccattggggatttcttggtaatacatctctcattctcttttgtttaatattgaacatgtatttttttattgaggtgaaattcacataatayaatcattttaaagtgaaaacttcagtggcatttagtccattcacagtgttgctcagccaccacttccctcatgtttcaaaacattttcatcaaaatgatgaaaaaagaaaccttgtggccgggcacgttaaaaaattttgccagtctgaagagtctgattggatttgatatgttgtttttctactggctcttttaaaaatttttaatttttaaattcttattaaaagaatgtatttataagagtcctcccacctcagcctcccgagtagctaggactacaggcttgcaaaaccagggctgactcattttttaattttttatagatacagggtttcactgtgctgcccaggctggtctcaaactcctggcctcaaccgattctcctgcctgggactcccaaagtgctggaattacgggtgtgagccactgtgcccatccctctgttttctctttttacccacggagatcacactttccgtcgtggggaggctggaaaatctggtgttcatatgccacttggtctggttgttctgcagtctgcatgattgtctgatttttcccagggagctttgaaaataccgattccttggttcagtcccacacctatgttggagtggggtggttcctcacatcatttagcttcgttgcagaaaactctccttcagatcttaaggatctttggaataaggctctttcatcttttctggacttttttttttttttttccttgacaaatgagaatcctctccaccctgatctacccaagtgtttcatgcctcatggaggaaagagatacttgcacatgcatttttatagcagcacaatttgcaattgcaaagatatggaaccagcccaaatactcatcagtcaacaagtggataaaggaactatgagatatatatatatatatatatatatatatatatatatatatatatatatatataaaatgatgaaatgctacttagccatggaaaggaatgaattaatggcattcgctgcaaactggatgggaytggggactattatctaagtgaaataactcaggaatggaaagccaaatgtcgtatgttctcactcataagagggagctaagctatgaggaagcaaaggcttaagaataatacaatggactttggcgagtcagggggctgaaagggtgggaggacggtgagggataaaagactacaagttgggttcagtgtatactgctcaggtgatgggtgcacgaaaatctcataaatcactgttaaaaaacttactcatataaccaaacaccatgtgttccccaaaaacctttggaaataaaaaaaaaaaaaacagagtgcacaagtagaagtagaaattgataacataggttgttgggcacatggccctgccccctgcctgctggcggagwattttcagctaaggcttggcttgtgaacttctccttcagccttacaggttccttgaattcagaccacctcttacagcatctygttcttcttccgtagcattcatcacactgaaattcttgatttcctgcgggtttgcttgtcaccacctgtcttctccctgtgggttagaacaggggccaggatccttttggtcctcccgtgtctyctgtgcctagctttcctgcctggcacacggtagactcacagtcagtgccgaagtgagcaggattcaacagtgatagccagttgtctttttttttttttttttttttttaatgttagggaagttatcaaataagatacttaaaataaacaactcacagytttttctcgccctcctatctttgcaccactcttctccttgatcatttaccgtgtagctttagtgccatgggcagctctgggatagtagtagaaatggtaatagccactagcagcagcagtagtaagaagaatgacaggaatgacaagtaacatttatttattttttgagacacagtttcactctgtcactcaggctggagtacagcggtgccatctcagctcactgcaacctccacctcccaagttcaagcaattctcttgcctcggcctcccgagtagctgggattacaggcgtgcgccaccatgcccggctaattttttgtattattagtagagacggggttttgccatgttggcgaggcttgtctggaactcctgacmtcaagcaatccgcccaccttggcctcccaaagtgttgggattaccccgcccaggggcttattgtgtgccagagsctgttctaagtgatttgcatgaagtaactcatttaatacataaccatgtgaggtaggtaccattaggactgatgtttggcaggggagaaaattgaagtggaaggaggctcagaaaccgttcaagttcacacagctggaattgaggggagctgggaaacctgtccaagttcacacagctggaattagtggggctggaactcactccaggctgcctggcttccagctcccagctctctacsccaggacttgggggttagggctggggtgtgacgagagggacatcgaaaagctcacaaaagacccacagtaatgttagggtgggatattaactacgtattgcttcataacagattgccccacatttagtggcttaaaacagcaatatggtaatccccacttatctgcaggttcagttacccatggtcaactgcagtctaaaaatatgaaatggaaaattccggaaataagcaattcataagttttaagttgtgtgccattgtgagtagtgtgacgaatttcatgccatcccactccatcctcccggacatgaatcatctgtctagtgtactcacgccatctacctgcctgcttgctagtcactcaggaaccctcagattggctgttgtggtattgccgtgcttgcgttcaagcaagtcttatttacttttattacagcatattatgtgttctattttgttataagttattgttgttaatttcttactgtgcctaattcataaattaaactttatcataggtatgtatgtgtaggaaaaaacatagtgtatatggggtcagtattattcatggtcttagacatccattggtgtctttcttacagggaaatgcattcccttactccagaaaatgtatttccctggagtaaggaagttcctcctgtcctctcccctcccctcccctcctccctccctccctcccttcctccttccttcctttttccctccctccctccctcccttccttccttccttccttcctcctcccctcctctgtttcmttccttttctcttttcttttctcttctctttttccttccttccttccttccgtccatcttgctctgttgcctagggtggagtgcggtggcataatcatggctcactgcagcctcgacctcccaggctcaagcaaccttcctgcctcagcctcccaagtagctgggactacaggtgcacaccaccatgctctgctaattcttatcgtttagtgaagatagggtctcaccatattgcccaggctgatctcaaactcctgggctcaaatgatcctcccatctcgacctcccaaagtgctgggattacaggcatgagccaccacacctaactgggggctctgttttctatttgctatctgatggtttttgtggccaggacaatttctgtggcaggcttggctgggtcctctggctcagggtctctcacagcctgggctcaaggggtctaagattctatggtggtaggacccacatacagacgtcagtgttgttggcagagtttggctctgggtgggttgttggactgagggccttagttctttcctggctgttggccagaggccaccctcagtgccttcccacgagggcctccctgtagtcagctcccctgtcagctacctgttcagagtgagcaggtgagagtgaatgagatggcagtcacagtcttctgtcacccactgtcagaggtgacctcccctcacgtcagcctcatgctgttatcagaagcaagtcactaggcccagctccactccagggggggtggctgacacacagcatgagtaccaggaggtggggggcattgcgagccactttgaagacttcctgcccaggaggagatggaggtggcactgagcacttgtattgaggaaccagagacgcacaccatgaatatgctttgaaacatcacacgttaggggattttttttttttttgagatggagttttgtttttgtttcccagactggagtgcaatggcgtgatctcagctcactgcaaccttcgcctccggggtccaagcgattctcctaccccagcctcccgagtagctgggattacaggcatgtgctaccatgcccggctaatttcgtatttttagtagagatggggtttctccatgttggccaggctggtctcgaactcccgacctcaggtkatccacccacctcggcctcccaaagtgctgggatacagaagtgagccgccacgctcggccctatgttaggggatttttatgtccagaggccaataggttctttcagactctgcaggacctgtgtccttggcaactcttgggtggagagggagctttctctcccacacagctgctgcttttcccactggtccacacctggctggatccctggcttctaaaccgtatcttgagtgtgcatctgatgtcaagaacatctgtggtctggaagcagcagcatagatcctgtgggtggggtgtttcctggggaatgagtgtcattatctcctatcgaattaytttaattttgttccagtctgaagttgttcaagacgtagggctgtgggctctgctagggtcatttgagggttgacttatcattgagcagtccctaatgtcagccatcctagaagaagtgaatggcatacgccactcttcagctagttgtgaaggacatgttatatttttttgagatgtggctcgtgtgtcttccagcaggaagaacagggactctgtgcttagagtctgtgatgctgtcagatgggcagatctatttttgttttaacctggcatgccccccttcccaggttattaaaaaacattcacagttaagrcatttagaacaaaaagttacaggtaaagagggggatcaaaactgccctccctctctctctccctccctccctttcttcctccctccctccctcttttccttccttccttcctttctccctcccttccttccctctttctgtctctctccctctccctctttcccttcttctgtcctttctttctttcttttttttgcctccctccctttttttcttttctcttcttttctttctttctcaagacagagtctcactctgttacctaggctggagtgcagtggtatgaacatggctcattgcagccttgacctgctggactcaagggatcctcctgcctctgcctcttaagtagctgggactacaggtatgcactgccacacccagctaagttttaaattttttgtagagccaaagtctctctgtgttgcacaggctggtctcaaacttctggcytcaagctgtcctcccgcttcaacctccctaagtactgggattacaggcgtgagccaccgtgcctgaccagttcatctccattttcacccaacaaaagaccttttaccttttcaagggatttcctttcagtctcttttctaagcatatccgagtgtaaatatccacacacattttyrtaaaattatcactgaactccatagaaggcttcctaaacttcctccctcattgaactatatgtatacgatgagaattttttcgtattattaaaatctgattttaatgatttttaacgcatgtgcagygttctgttgaaagaatgtgccactatttcattcattaacttattttttggctgcttaggctgtttctcaatttcagtttttttgttttgttttgtttttgttttttgagatggagtctcactctgtcatccaggctggagtgcagtggtgcaatctcagctcactgcaacctccgcctcctgggttcaagtgattctcctgcctcagcctcctgagtagctgggattacaggcacctgccaccacgcctggctcatttttgcattttttagtagagacggggtttcaccatgttgggcaggctggtctcgaactcctgacctcaggtgatccaccagcctcggccccccaaagtgctggaattacaggtgtgagccactgcgcctcgcttttttcttggttttgactactaaaaatagtgctgtgaatgtccatcttggtgaggttgtctttaatgaaataagtattattttgctatttttttctcattttctgacctctttatctttggttgggttggtggaactgggcctctggggcttttggactagttctccccttggcacaaacctcaccacactcctctaatgtgatggttctcatcctgggggcattcgagaatgtctggcaacatttgtggttgtcacaaccagaggctgagagtgctactggcatgtcataggtggagagcagggatgccgctcagcatcctgcaatgcacaggacagcccccacctgaggaagggcctgagaaaccctgttatgatgtgttcatataacccaaatgctctatgcaaatgactgtccagttatctgatgtgaggaagttttagttcagttataaaacttctcctaggcttggtacggtggctccygcctgtaatactttgggaggccaaggcaggaggatcacttgagccmacgagtttcagtccagcctgggcatcattgccagactccacctctactaaaagcaaaaaaattagctgggcatggtggtgcacacctgtagtcccagctactgggaaggttgaggtcaggaggtccaggttgaggtcactcgagtccaggaggtcgaggctgtagtgagtcgtgattgtgccattgcgctctagcctgggcaacacagcaagaccctgtctcaaaaaaataaagaaaaagaaaaaagaataagaaaaaaaagaaaaattctcttgacttggtttagtgactgtggacagccccagtttgggtctcccctgtctcttttttaaacatgtgtgagtgcacgcacagtgcaagatggcaccttcttgcacccacaaagcaaggccatttccttgtgtgaatgtctgtctcttaagaaatcaggcaaggttggagaaggactcgtgtgatgtctttttgcaggaaggttgtgtccctgttttgtttttgtggcgtacaagatgttccagtgccttctcccccttcccacgtggagccacgggtttggatcgtggctgtagatcatcgtagcgctgtcattgctrgactaaaagaggcctttgagcaggtgccagatgcagaccacggtgggaaaagatgaggcccccaaacaatgccacacagccggccgatctctgtaaatttatggcgtaatcttgccataatatgggaacgaaataaacttgtgatgaactccgtgggaggaagtgactcatgggaggggatcgttgatgcggtatttatattggacagaacttctgaactcactcaagcccttttcttagtgaggaarctgggctgggagcatcatttcctacagccacatgttgttgagcaccctttggttgtcggggggaaggaaaaaataaaacctctgattctttaatgtgcagaccccacagctctctttggcctgcgtcaagagcaggcatagccacagtctatcagagataaagtgtgcagttgaacgcttttaaacgtgggtgcctgtcttggcctgggggtgctcttatgagtcagcatgttgttctaaaagattgtyggtgattaaggggcatttgaaagttattctaaaagaggaaactctaccactaatctgattttggatatttctgttccaygaaagggctgcatagacaaagtggcctccaaaggagcctgaaaccaaagaacaaggcaggcaaatccagtttgtcgttaaagggtgttttattgggggaaacttacagatagaagcgtggtttttgggggagccgaacagacagaagtgtagttttgggcggcaggaaaacaggtggatgtccatactgttactccctagacccagggcttataccacagggaaagggtccgcgtgccccagcaggacaattacgggcaccttccaggagaggcaagaaagctgtatgtttcatcacctgtaatttgtgcgataacatcaaggttgacatgttcttatgtgaaggacggtgaattaagtaggaatcgggggtgttcatgggactgggctaatcagaagtcagcatggcgcatttgcacctgagatgcagtcactttttttttaagatggagtttcgctcttgttgcccaggttggagagcaatggtgcaatctcagctcattgcaacctccgcctcccaggtttaagtgattctccagccttgcctcctgagtagctgggattacaggcatgcaccaccacgcccagctaattttgtaattttagtagagacagggtctcaccatgttggctaggctggtctcgaactcctgacctcaggtgatctacctacctgagcctcccaaagtgttgggactacaggcgtgagccaccacacccagcttgagatgcagtcacttttgtctccacggttccatattcaatgaagactttccgggcatttattctgggcttcctggagtagcaaaatttaggcacaaggtattgatggccatgctcagttttcttgcttrtctttactgcctcccacctcccagtgacgcgaatcattgggggaaaatgggggaaggatctgtggctgcgccgtcattcctcagagctaggacttctcagtctcagcactgttgacttttagggctggaggagttcctggtggtggttgggggcgtcctgtgtgatgtaggagggtgagcagcacccctggcctccacccgtcagatgctagtaggacattgcctgcgttgtgacacctagagtgtctccagacattgccacatgtctcctggagggccacattgccctgttgagagtactgggctgagccttgttctctaygtacagtatggctgggggacttgggaaatcactctcatcccagcagcagttataccactgaggggtcctttccatgtgtcagtctctgtgctacatgcttgattcctgttttacagatgagaaaactgaggtttagggaagaggagtagcttgtccagctgcacacaactagaaactggtacttggtccaagcatttgatgcctgtgccatggtgctacccactacccagaaaatctggttagggtgaactgaaactctgggtaattggatctctaggcaagtccttagttagacttagggatctggaattattctcagctgagacagtcagtttgcccccaggagacatttgctaaagtctagagacattctggttgtcaccatggagggtgtatgactggcatctagtgcgtaggggccagggatgctgctcaacattgtacagtgcacaggaggggccctgcagagcaaagagttatctggccccaaatgttcacagtgacgaggttgagactccctgttctagtccttatcttccctattctttcagtggaccacagtttgatgatatctgcagtcccaagtgtaaatctaaaatcatagcatgtgagtctattccagttgaaatagtaataactttcaaaacaaaggtcttaaatccatttgatctttctttcatcattgaaaatcttccaagtgctttgagttttccttttactttctgtagcctttgcccctaaatgaggccccttctcgcttttcatcttcagccaastgaaaaaacattggtgtctgttaagtgcactttgtacactgtctgtcatgggaagcgggctttgccgctgaaagagggtgttcctttcagtttctcattccttccggcctccctctctaggatgaatcaactggagaaattacgttttacatgaagggagcagatgtggtcatggctggcattgtgcagtacaatgactggttggaggaagaggtaagtgtgatgcaggaagttaaaccaggccttggaagcatgttctgcagaggcagccccttgcatggtaaggtgggtctctgtatttgttatcggtggctgtgtaacaaaccaccctgaaatgcagctgcttaaagcagcacccatttaatatataatggtttctgtgggtcagggatgctggtgtggctgaactgcatcctctgcttcagggcctcccactggccgtaattcagatgttggctggggctgtggtctcatctcaagacttgaccagggcaggatccatttgtgagcaagctcagttgttgtgggctrcattcagctacttttggactgttgaactaagggtctcaggttgttgccaactgttggccagaggccgccctctattccttgcaggtgggcctctcccatagggccactcacagcctggcaactagcttcaacaaagagagcaggtgatggaacaggagagggcaaacaagatggaagtcactgtctttactaacctgatctcagatgtgacatcccctcactcttgcccattctgtttgttagggacaagtcactaggtccagcacacactcaaagggtaggcgattataccagaatgtgagttccaggaggggccacatcagaggctgcacaacccagtttgtgacgtggacagttggccagcagcaggagggaggcagttttcaggccatttttgtcccatctcttagctctagggggaatttacattttgcataagattctcagtttgagggttgcaaactcaaatgcctacaggggcctggcagttaatgcaaatgaacaaacaggttgtgattttgagcagagttgcactttgcgtgtaaaacgtgctggagtgttcttcacttgacacctccacttcctgggaacacgtggaggccactgctcctcagccatcattgattgtggttatttgggaaaatgyacctggttttgtcagatgctcagtttttccacccattcagcagtccagatttgtgtgtgagaccgcacaatgttgacttaaatttggaaacatacatgtgctagttgaagacgacctgtgggtgggctgtgtttggctcaccggctgcctctctgcaacttcccctatagaaagcttgctccagggaggattgccgtaggggaaagcaactttctgatttgccattttctctgaccctgtgggaggggcacatccacttgggcactggtccttccccagtgaggtcaggagctctcagcaccgctcccactcgaccgtggtctatttttcagtgtggcaacatggcccgagaagggctgcgggtgctcgtggtggcaaagaagtctcttgcagaggagcagtatcaggactttgaagtaagttgttctgggacctttccattgcctttgcagccccncctgcctcccagtcactccttccaccatccctcatcctatgcgagccattctgatgtcatttctgggcacactgggttcactgttgttgaaggcctttgcacttgccgttctgtctgcctggaactctcttyacccacagagccccatggcccattncctcgcttcttttgggtctcagctcaaaagccacgtcctccaagaagtcttcctggaccacctgtctaaggctccttctcactttccatccatcanaccatttcactttgttcattgcatttgtcactgtcatcgcgtgctaccatttggggccaaaaaatatgtctaggagttgaatctggagaggccagaagaatataaacttgaccctgttcatatattttttttaacattcatcttatccatctcctttcgggaataaaatatttttgaagacagggactttacaagtctggtttgttcttcttattcttgttcttcttcttctttttttttttttttttgagacagagtttcgctcttgtcgcccaggctggagtgcagtggtgtgatcttggctcaytgtaacctccgcctcccaggttcaagggatccttctgcctcggcctcyggagtagctgggattacagttgcccgtcaccatgcccggctaatttttgtatttttaatagagatggggtttcaccatattggccaggctggtctcgaactcctgacctcaggtgatccaccagccttggcctcccaaagtgcagggattacaggtgtgagccactgtgcctggcctggtttattcttatatccttagtagttaaagatagtccttggcatatggtatgccttygggaaaatttggcataaatcattctcttggagccctaatttcttttctctttttttttttgcacatttattctgagacagggtctcgctatgctgcccaggctggtctcaaactcctggcctcaagccatcctcctgcctcaacctccttgtagctgggattacaagtgtgagccaccgcatctggttcggctccctaatttcttttcttttttttttttttatttgtgacagagctttactcttgttgcccagactgtagtgccaatggcacgatctctgctcactgcaacctctgcctcctggattcaagcgattctcctccctcaagcccccaagtagctgggattacaggcatgtgccaccatgcctggctaatttttgtatttttagtagagacacggttttgccatgttggccaggctggtctcaaactcctgacctcaggtgatctgcctgcctcggtcttctagagtgctgggattacaggcatgaaccaccacacccggcctccctaatttctttaagctgtaaaaatgttggggttgaaccagattattgacttgcttattgtcatcccatcccatagattgtgtgttccctgaggggagggtcctcgtcttgtttactgccgtgtctctggtgcctggcctaaatccagcgtgcaggaatgcaagggagggaggcgggacacgcttcgtggggccctgccctgctccatgcggggaaactgcctggatctctctttaatatatttgagttctttgtaagccattatttaacaagcattttagcccygatcaatgctacctgccttttaattttaaaagcatgtgcttcaagcgggcccattagatgactggttttcctccaggtttttgctaacatgataaagagaagaagcggcagtttgggttgatggtcttcagaagctcgacttggtctttagaaaacctggtgacccacagtttggcttacaaagtgcatgttgtgtatgggagaacttactgtttttttgagatcttggttgtgcccgtccctgagacaacccaatgaggttggtgctgttattgccatttcgtggccacggctcagagaggttaagtgacttgctggaagtctcccagcaggtgagtgtggagtgtagggtgggactcaggtctgtgcagtgtctacatggaggacttgtgaggaagctggaagcctatgtcacccctgtggggtccagctcacctgctggggtcccccaccccgtgtggtggggatcgggtgtggcccttccactcttggcactggccagtcagcctggcctctcctcaccctaagcagtgactgcatctgctggtgtgtcccaggcccgctacgtccaggccaagctgagtgtgcacgaccgctccctcaaagtggccacggtgatcgagagcctggagatggagatggaactgctgtgcctgacgggcgtggaggaccagctgcaggcagatgtgcggcccacgctggagaccctgaggaatgctggcatcaaggtagggcgggctgcccncagggaagggcactccagggcaatgccagttatccctcagcagtgcagggagatcacagggggaaagggtgggaggagcagcagaggacaccaggagtgccttatctgcaatgggccacaggcactgtttctgcccctccaactgtgatttttttttttttttttttttgagacggrgtctcgctgtgtcgcccaggctggagtgcagtggcatgatcttggttaactgcaacctctgcttcctggattcaagcaattcttgtgcctcatcctccctagtagctgggattacaggcacgtaccaccacgcctggctaatttttatatttttgtagatagagggtttcaccatgttggccaggctggttttgaactcctgacctcaggtgatctgtctgtctcagtctccgaagtgctaggattacaggtgtgagccactgtgcctggccctccagccctgattttggaagacatcttgtgtagcgtttgcctttactgtaccgatgactcccctgactccactgggctccctggtgctcaaggccgagcagtgtccagcgtgcatggctgctgattaaattctagttgagtgatcagcacgccggtctgtctgccgtgtggccaagtgagtgagtgaccacccagcagagtgaccgtcagcgccatcacactgtcgtattagcattttgcactctaccagtggcgacccaaaaaaaaatactaggagttgaatctggaggggccagcagagggcgcgtgaggacctggtcctcagtggaccaagggaggtgtgaacaaccaaactcattggcctggagctcctggaaacgtgtgcctgccaccggcctccactcaaaagtggctctctgctgcatcctggggcctgtcctttcagcagggccatggcaggaggacaggttagatgccaggcaacattcaggcccactggggactcccacccctgcgtgcctgtttccttgtaaacccaattctgtcgcttgcatttggctcacaggcctggttcgtcataaggaaatcaccaacgggaccttgcttccggaagtctggccgctggaggcccatttctgcttcatcgtggggtctgcagtggggccctggccattcctaagacttctggagtttccattttctgcttccatctttgtcctggggtttttctccttctcaaaactatgttagcccaagacgagatattttattcacagagtgtgcatgtgacttaccattctagtttcctgttagatgacaggaggaggggagtgcctgggatggggcaggttagttggtaattaaagtctaagatacgatcttgcacaggaaattttcttttcttttctttctttctttctttttttttttttttttgagacagagtttcactctgtcgcccaggctggagtgcagtggtgcgatctcggttcactgcaacctccacttcctgggttcaagagattctcctgcctcagcctcccaagtagctgggattataggtatgtgccaccatacctggataattttgtatatttagatatttagtagagatgggttttctccatgttggtcaggctggtctcgaactcctgacctcaagtggtccacctgcctcggcctcccaaagtgttgggattataggcgtaagccaccgcgcctggctgcacaggatattttctaaatcagccccttgtatggatgtagaaactgaggctaagtgaggcgtctccattccccaggttctcacattgggaagcagcagagccgggactggagctggggtcttggacccttcctgtagtaccttgccttcatcacagcatgggacattagccatgtcgtgcacctgatcgttcttttcatgcttttctggaacttgaacttcccaattccttccccagtgtttgttctcttacctcaaaccctgagaactatgactaaacgargctcaccaaaaagaatattatttttaggacaggcgggatattgagggaaaacagacccagctaggggagagggcccgggaggctcagccctgagaggtgcccggtgccttccttctgcccgtctcactgcctgggtttccatcctacctctccctttacttcttctgtgacccttggcaaatgactgaagctcttagcgcttccatttccagcctccagaagctgtcatgaaggtaacagagagctcagcgtgggtgctgggcacgtagtggacactcaggagacaattgtcatgatcttctttcctatactttccctcctatccagattttctttgaccgatagccccaagactgctcccagctgggagcaaagagaacaaaagggttaatgaggtaaaatcacagagcaggaagcacattccatgaggactctaaagacccggattctgggcctggttaggacaagaggtagctgtgtggtttggggcaagtcatctaccctctctgagcccacagcagagaaatgcagtgtgagytaatgcacgatacggaagaacctgactcatttacggtcagcgttttataagctgagttaaaccccagaagsgtctgtcttgctcatccaactacatagaaagtccacagcgtcaaaaatgagtgtttcctgtaggacagggaagtgccccctcacctgtacagcctttcccttcttttaggatatttatcactttaagaaaaatcctcagaaggggaattatgcggtccaaggaccgagcttcatagtacctcctgtagtgtgtggccaaatggccctttctagaagcatctgccagtttttgctgctaccagcagtggttgcttggagtcccagagcccttcagccagggcgcttgctgtgttgtgttggggacagcatgagtcggcaggaggtaaacggaacataccaagttcagctccatgttgttggaaactcagctgttgcagatgacaggccggcctcaaaaactaataaacaggacctctgtcacgccatgatttcaggtttggatgctgacaggggacaagctggagacagctacgtgcacagcgaagaatgcacatctggtgaccagaaaccaagacatccacgtttttcggctggtaaagtgtcctctgcgttagggccatgtggggatgatgttcgatttgtcctataacctcctaacctngagtgggccccttaagaagggaggggcagcatgtgaattacctagggtggggagcatcaaccacggttgctttggatgggatgattaatgacccaggcgccggctggagagtttcttccagtagtggtttgggagtacctccttctagccctgtgctaatgccatgctcttaaccttttgggggtcgtggtccctttgagaagctgatgaaagtcaggcactccccccgaaagatgcagatccactcatacacatgaaattatgcatgggattcctgggatttcacggaacccctgaaagtcaagtccttggataagaaagaaattccaggccacagatactggtccatctgccctcctgagaggggaagcatttaggaccattgaggagccttttgaaggaggtgaactggatgggcaaatgagaaatcgcccgcccttgtggcagacattgaccaagacaatgtgcacatcaggaactgctgccagtgaggactgtgctaggctttattgcattggggaggtagggggaccgggtcctctttggggcaggatatagtaatcccactgatctgaaaccagagccacgatggcaaaccactggagggtctctagatgtttgggggtctcgccctcaccccgcctttggtccatagcacacagaagcttcaaaaaatccagggatttttgaaatagcatagtattgtatagaggcaggtacagtcagttctcatcattcacagattctttgtgaattctcctcctcccaaaatttatctgtgacctccaaatcmgtactcttgatattttcactgtcatacgtagagtggcttaaatctctccttttttttttttttttgagatggggccttgctcttatcacccaggctggggtgcagtggtgcaatcttggctcactgcaacctccgcctcctgggttcaagcaattcttctgcctcagcctcccaagtagctgggattacaggcgcctgccaccacacctggctaatttttgtgtttttagtagagacgggtttcaccattttggccaggctggtctcgaacccctgacctcaggtgattctcccacttcagcctcccaaagtgctgggattacaggcgtgagccaccgcgcctggcctagagtggcttaaaattttagctgcctgagacacacattcccacctgaggctgaacaagctcacgcactcccccctcctttcagccccgtgtgacgaaccagtgtcgtttttgcagtccatcgagtatccggttttttgcatttttatgctttttgttggcagtttgtcgtttaaaatggccgcacacagcgcttctttgctggcttgttttctggaacttgaacttcccaacatccataagtcacatcaacaggaaggctgttgatgtgacttatggagcgaatgcgtgtgttagatgagcttcctgcaggcatgagttacagaactggtggctgtgagctcaatgttaatgaatccaggtgtctttaagtagaaacgcacataaaataaggttatatatttatgaagatattgcaaccaggggcaaaaayctaaccctgtatttcccctacaggtgatggtttagtatttgctaattcagtgttcacagtgactttagaaaacatagctactatgaataatgagaattgactgtctgttctagaattcagggattgcaaactaatgacctatgtgctagccacctgtttttctaaacagcaggtattttgttttattggagtgtagacagaccggctcgtttgcatatggtgtacgactgcttttggattacaacggcagagctgagtggttgtgatggagaccatgtggtcctcaaagcctacaatagttaacatctggtcctttacagaaaagtggcccagtccctgctaggtgcctggctctgcatacctgggctacagcatactagccatgtgcctttagtcaggttagcagatgtcaccatgcttcagtttccttaggtgcaaaatagagcttcttctttttggcacctcatagagccgttgtgagaaataaatgagaaaaatccaccgaatgcatcatccaacacctggccgaaaatgaaagtacaggctttttttttttttttttttgagacagagttttgctcttgttgcccaggctggagtgcaatggcatgatctcggctcaccgcaacctccacctcccaggttcaagcgattctcctgcctcagccttcccaagtagctgggattataggcatgtgccaccaagcccggctaattttgtatttttagtagagatggggtttctccatgtgggtcaggctggtcttgaactcctgacctcaggtgatccgcccacctcagcctcccaaggtgctgagattacaggtgtgagccaccgtacctggcccccccccccyttttttttttttaaagacgagtcttgctctgttgcccatactgccagtgcagtggcatgatctcggctcactgcagcctctgcctcctgggttcaagtgattctcctgcctcagcctcccaagtagctagaattacaggcacccaccaccatgcccagctaattttctatttttagtagagagtgggtttcaccatgttggcaaggctggtctcaaactcctgacttcaagtgatctgcccgcctcagcctcccaaagtgctgggattacaggcatgagccactgcgcttggccagtacaggcatttttagtcctgggggaaattgtaggtggtggttggcacatgggctctctygattcctgcagagtcaaccaataggattccatttggtgctgcctctggtggcaggggaggggagggacccttggctggggtggccgttgtcttcatgtgggctcctggaagccactgtttgttgttctatcatgtccggagagcaatgcctccttccccatctctgttcccttccaggtgacyaaccgcggggaggctcacctcgagctgaacgccttccgcaggaagcatgattgtgccctggtcatctcgggagactccctggaggtgagcttggggacccctgagagccaktcctcccagcagcctgggtcttacccggcttcggcaggggcactgcaggctcggcagcgacctccaccaacgcaccacctctccctccaccaacgcaccacctctccctccaccctgcaggtttgcctcaagtactatgagtacgagttcatggagctggcctgccagtgcccggccgtagtctgctgccgatgtgcccccacccagaaggcccagatcgtgcgcctgcttcaggagcgcacgggcaagctcacctgtgcagtaggtaggcgaggctcaggctgtgctgctggccctggcctgccggtgcaccaggctccctttccctaaggatatttggacactgctgctctttcttcaaattccccaggcccctttgttcaggtcatgatttttctccacctctcagactttggctctttttgttattatttttaatatttcccttggagagtagataagcaygtgccaggcctctactcctttgccagtggctcaagagtgcagccttccagggggtggagaccacacactgtggggttggatctgggttcaaatctttccactggcctttgccagtgggtgccccaggtggcttctttcacccatctgagcctcggtttgcttatggtagaatgggaataataattgtggcttccttaaatggtgtcatgaagactaaaaggggtcacctttttttttttttttaagacggagtcacactctgttgcccagcgggagtgcaatgacacaatctcagctcattgcaacctccgtctcccgggttcaagtgattctcctgcctcagcctcccgagttgctgggactgcaggcgtgcaccaccacgtgtggctaatttttgtatttttagtagaaacggggtttctccatgttggccaggctggtctcgaactcctgacctcaggtgatctgcctgcctcagcctcctaaagtgctgagattatagtcgtgagccactgctcagcctaaaaaggatcacctttaaaatgtgcttgccacgctgcatggaaagcgtccagtaagagcactacaagttgctgctgatggtaatcctggggtatcccggcctccgaggaggacaggtggtggtaaatgcctatgtggacacagtcccactgctgctgctcagtgccgggacccttggcaagccgcctgggctctctgacactcagccactctgcctgtgaaacaggatcttggtagtcaaggggttggagagatggaatggacggggcaggccaggcactcagcaagcgctccgtgaaagacgagagtgcggtaaagacaagcatamattcttggttaaggtaagaatgaaacatcttttctctctggtctgtgtggctcgcaggggacggaggcaatgacgtcagcatgattcaggaatctgactgcggcgtgggagtggaaggaaaggtgagagtgtttccctctgctcggctccacttgctgtagtttcttggttctttttccctcaaagacacagctttaagccttctggaaattccagataatgataaaacataaggaatcatgtgtcacagttaccttgtgtcactgggaagatagaggtctgtattgctacatcttacagacagatgaatgttggctttttgtttgccacgacctgaatttaaaaaaagaaaaagtgtttctaggcccggtgtggtggctcacgcctgtaatcccagcactttgggaggctgaggtgggtggatcacttgaggtcaggagtttgaggccagcctggccaacttagagaaaccctgtctctactgaaaatacaaaaattagctgggcatggtggtgggtgcctgtaatcacagctacttgggaggctgagataggagaatcgcytgaacccgggaggcagaggttgcagtaagccgagattgcgccactgcactccagcctgggcaacagaacaagactctgtctcaaaaaaaaaaaaaaaaaaagtttctctatattcttagggtatggtaagtatacttcagacttctctgggacagtcagcgttgtcagtaaaagcattagttatcctgctctgtgctgatctcttgggcgctatggaagagtgtggcttagttcacttctcaccaaaaggccttggcaggtataatttttaaaagttggtgtgttaggaaatattttttctgtctttttctccttgccaattgtgcgcttgcctcttacagtttactcggccctaatttgtgacctctaaatgacaagaggcaagaagatgggtcaccgagtttgttaggactgtgtgtgaagggctggaagcggtggctcacgcctgtaatcccagcagtttgggaggctgaggcgggaggatcacttgagctcaggagttcgagaccagcctggcaaacatggtgaaaccccgtctctactaaaaatacaaaaattagtgagatgtggtggcacatgcctgtaatcccagctactcaggaggctgaggcaggagaatcacttgaacccaggaggtggaggttgcagtgaatcgagattgagccactgtactcttgcctaggtgaaagagcaaaactccatctcaaaaaaaaagaaaagaagtgtgtttgaagtataggagtgccaaggcccggagggggcagcagagatgctcccctgtccatcctgttgcatagcttcatgactttggctgacccatagggctttttttccccctctttaccaccctttctggttctctggttctcagcaagatgacgatgatttaaagttgtagagtgaaatgatttttgaatgagatatatcagaagtctgtatagattccctgaatacagtttttaagaagcatgtttttgagtttaatggcattctctaccagttcttaaaaaattaaagcattttcccttctattaaaaatggtattctggttcctttgtttcttgggatataaaatagtgctcactataaaaaattaaaagaatctaggccaggttcagtggctcacacctgtattcccagcacattgggaggccgaggtgggcagattacctgaggtcaggagttcaagaccagcctggccaacatggtgagamcccgtctctactaaaaatacaaaaattagccaggcatggcagtgggtgcctgtaattctagctactcrggaggctgaggcaggagaattgcttgaacccgggaggcagaggttgcagtgagyggagattgtgccactgcactctgggtgacagagtgagactgtctcaaaaatatatataacataaaataaaagaatctagaagtaaaacgcatcttttcttttaggtaactgcatcaaatgagtaacactggttattctctcaacattttttctgtgtgtatattactggttatgagtgtgtatatatttgctatctatacaaatatcttacacatgtatatatatgtaattttcatgtatttttttaaattgaaaacacactgtacattttgttgtgcagcttacttaaatctgctacatcatggatttgttcctacatgagagcatacagagccatcacttcttactctgactctacctttttattttgaaaaatgtcaaaagttgaaatacaacaatggaaaagttgaaatagaacagtgarcattcatctacccttcactttggccaattgttactatttgctacattatctttctttctttgaatcagtagaaagtaaattgtatgtaatgttacccctaaatatttcagctggatctctttagaacaaggacattctcccacacaaagaaagtaacatcataaccacgccccaccccccgccccgcccccccaggcacccccaccccatgtaacatcgatacaatgctactatataatattcatgctcaaccccgtgtaacattgatatataatggtactggataatattcatgctcaaattcccccatctgtcctctgagtgtcttcacagcttaagtaataaaagctccaggaaggattgcaaatcacatttattagcatgtcctcatgtttctgatcttctttattgtagaacacgtttctctctttttgtttggtttggttagcgggtgttttgtttttcatgtcagtgacatttttgaagcattcaggacagttgtagtgtctcacggcacacagttcttgaacccatcagattgattcggttccaattctggtttggcatgagcactgtacaaggggaattggtgttcttcctgttgtgtcgtatccagaggctctcatgtccctctgtccctttattgctggctgtcactgccttttaaaatgagagaattcggccaggtgcagctgctcatgcctggaatcccagcactttgggaggctgaggtgggcggatggcttgagctcaggagtttgagaccaaactcggcaacatggagaaaccccatctctaccaaaaataactaaattagtcaggtgtggtggtgcatgtctgtgctcccagctgctcaggaggctgaggtgggaggatggcttgaacctgggaggcagaagttgctgtaagccaagatcacaccactgtactccagcctgcgtgacagagtgggacccagtctcaagaaaaaataaaaattaaaaaatacaaaatgagagaattccattatatggttgcactgcaagttattcccacttctgtgagtgtgcagagctgtgtattcaggaatatcctatctaatattgttagtagctctgggtttttgcctcttgtttaattagctcttaagggaactgaatgttttaaaatatctatttttaaatgattctttgctacttatggggtgggctgaactcccaaagtattagatccacttgacgtccaaattataactatatgtgattcggaatggtttttatttaaataaattccccttttaaaatcaaatttagacttggaccaccaactgcatatagcttgaaaccaaagaatttctttcttgaagttcttcaaagatytcmtacaatgtcttgctttttcagtgaaagaaaatgtgtttgccctgacctcttgtgcttctgatggtgcctaattttattggattttaggaaggaaaacaggcttcgttggctgcagacttctccatcactcaatttaagcatcttggccggttgcttatggtgcatggccggaacagctacaagcggtcagccgccctcagccagttcgtgattcacaggagcctctgtatcagcaccatgcaggtgagtggacagctggcccctctgcacatgtgcctgtggctataccatgtaggtgggtgggcagctgctccctctgcacatgtacatgtggctatgtaattatcatggaaaaagcctgggaattagattatgctttggagctgtcacccctacctcgccagtttaaatcccccacctggctgcattccagctgatagaccttgagccagtccctgaacttcttggtgctcaagattcctcccctgttaagcggtgctggtcattcctgccatgtggtgaggatgtgtgcgttagcagtggtgacatccagtgcctggcatggggcaagtggagtgtacatgagttattttaattgtgggtacgttgttataatttgtttgctggagtgaaagacgcagagttaaatgctgaatgactattcaggccctggtttttcaccttttgcagaggtaagggccatcagagaacaaccactaaagaagaatgtactttgcttgtgtgcctcctgtaccttaggcatcaggctaagtgttgacaatgcagtgtctcacataagcctcacaatagcctgagcccattttacggatggggaggctgaggctgaatatggatgagaaatttgtggtgtcccgcagggattcagtcagctcaggcaggtggacctcaaagcctgcagtcacaatctgagtaccttcttgatacactcgtcatggagggcctgggaccgtgtccacttgcaggggtcagcatgacacttggcactgagattgactcagcatcacggttctgtcttccagcagagcctagtaggggaactgagtttaattattatgatcacgaatacccttggaagttaacatcttgttcccatcttgctttttcataaaaggattctagagtatatattttctcaccttctctctcacaaacttcttcaaaatctgtcatcataggccaggcgcagtggctcatgcctgtaatcccagcacattgggaggccgaggtgggcagatcgcctcaggccaggagttcaagaccagtctggtgaacgtggtgaaatcctgtctctactaaaaatacaaaaattagctggacatggtggcatgcacctataatcccagctacttgggaggctaaggcacgagaatcacttgaatctgggaagtggaggttgcagtgagctgagattgcgccactgcactccagcctgggcaacagagtgagactccatctcaaaaacaacaacaacaaaatttgccatcagtctgtagcaattaagtgtggagtagaaaggaggccaaaggagggaaagaaaatatttttggtrttaaaaagctattgattgtcaatcttyctttttgggcattgaggtgaaaatgctcccagttgagtggtgagaatgtaggtacagtagatcctggaactcacgtctccttctggccataccattaaggatctgtgagaccttgagcaaataactttactactctaggcctcggtcttccacctggaaaacggggatgatgagaccctccttgccctcggacagggccactgtgaaaaacagagacgtttttaaggcatcagtgctaaggcatccttaccgtgattagtagaagtgaaataaggtaatatgtaaacatcaggtgatattttaatttgtgagaatgtttaatcatacttgaaaggcggtctgccttgtacaatgtatcaggtagtgctgctttgggtacatgagaattttccgtccactggctacaccccagttttttgggggtgattttatgttttaaatatctattgcaattgtgagtaggggagcctgaaagtgactttcatcaaaatgatctaaacccaaacagctgctgtggttcaccagaccacatctgtacttttatgttaackcaccaattgaacaggataatgctgtggctttaatgattgggagattaatcagcccgtccttggactcatacacaaaagctggccgggatgagctgacttcttcaaaaactggatgttactgttaacattgatgtagaaaaagaattccaggatgaggcattgttctttgtgctaaagaaaatgcctttaacccctgtccactgtgctgaaaatggccragagcaagtcccagttagaattgcaccgggacatgagtctgtcagagaacacagtgtttttatttttcccaaagtgctcttgtcgagatgaagactttgtggttaggatgacccttttagaggaaggggctcctgatactggtytggaaaataaacaacagattcttgacatttttacaaccatccttcctaagcagcggcacagcctgggtgaaaagtcactggaaaagtggcttttccggcgcagccagggcgaactggggcttcctgtggccatggcgctcaggatcacctgcgctctgagctctgtgccgagaaagcacgtgtttcttacatgctttctctctgtgtccattgaaggtgctctggggagctagccctggtctgatgctatttctaatgactagggtatctctgccttgctttcttctgctttctaaaagctttcaggcagcatttgtctctggccttccttcagctttatatgaatggatatcagcttggagaccgtgtttcctctgttagcccatagaggtccagagatggagctaacagagcttcaagcctgattggatctccccagcctattcatcattaccagcagctaatattttccaaagcaggaagcagacatttccgcgagggtttgtaaatatcttcattgcttttgtctaattgcaaaaataatctgtcaccatgctcttttcaaaaatttccccaaataccgaaacatgtaatataagaagtgaagccttttctgccatcccagcccccgtagacacttcagaggctctttttcygtatgtgtttccatacctacggcactttggttagcagcgtgcatgcctacagaggtgaggattcygagctgtttagaagtgtggccacagagctgtggccacagctgggcttgagtcccatagggctgtttacctgctcagcctccccttctgtaaagtgtgggtgatagtagggcttgatcctgtgggctgctctggagatcagctgtgctcatgtacaaagcattcctgggtcctggaacttaataaatattcacaacaggctgagtagaccctggagctgkgatacatcaccctacccgggaatgattcctagatttgctgcttaggaactgtrtgggcttgggcaagccacgtaccctctctatgcctcactttctgctttgcataatgaggatgatgagaatcrtacctacttcatagggttgttgttgatgttgtgagaatgaaatgagcaaatccatgtaaagtaccttacrgcagtgccggcgcgggtgttatgtaagtatcaggtgttatttttattctgtaaatgtaagggattttgtcatgacttttggtgacatcctcctctctccttggcacaggctgtcttttcctccgtgttttactttgcctccgtccctctctatcaaggattcctcatcattgggtaaggaaatcctgccaaggaattaattgtttacaaaaccttcttcaaatgctgcaacagagagaagaaacgtggtggaaaaattcytgggttcccaagccacattggattcccagccccagcgaatgcaggcccagcaccatggtttagaacctccttcaattaacaaggttttgagctgttaagcccttaaccagatggaggaagtggagttggagatgtgtgtggtgtgttgcactttgccatttgtacctggtcttgaaaaaatactccagagttatcagttgattgaggagagcaaggtggaaggtttgcagacttggtgatttcactggggtcttaataaaaaggggtgggggatctgaaaaatgccctcctggcctgaactgagcccagtagaagtcccatccttggagctccarggagggccagagtccacwgcctcggggatgtgcaagtaacagagcttggctgctgtgccacagtgacagagatggtgtcacttgggcctttgcagcctgcaaacccacccccattactgacctggaacttcaggatgatccttctgaccttttcagagaatgtgctcagtctctgaatcacccaggtaggtggagtttggttaccgagtgccctagatacagacacatgcagctgaggccacttctggttatgaggagacggcgggtgcgggaaggtcagctgcgctctggagagtctcacagagtccgctttccatcytactgtgttggctgatgagttcagcctgagaggaggcattagaattctgcctgcttctaactggaaaagcgggctgtctttcgtcgggttctggaagagtacaagaacattacagaatatagtcaggggttccctgagctgtgcgccrtgcgaccttccgtggtctggtcccatctttcccgtgggtcctcatttcctcttccgtcgccctcagccccagccccactggccttatggctgttcttcagacatgacagccactcccgcctcagtgcctttgcactggtggttccttctccctggaatgctcttcctcctgggattggcttggctggccctcaccttttgtgggtgttcactcaaatgttctgttcctcagcctctaaaattgtaccatcaccccctmcacacacacacacacacacacacacacacacacacacacgtcttatttcctctaccccattatatttttctctttagcacttctctaacacacatagagtttacctaatttatttgtttattgactcgctgaccgggatgaaagctcttcagggcagacatttttgtccatttttgctcatgggtttctggtgcttacagccagccccggagcataatagacaagcagtaaatatttgttagaggcatggttgggacttgggtgcyggaggctggcacagcacatagctcytatygcgtcagccaggtcttacctatggcggttttctctcccaggtactccacaatttacaccatgtttcctgtgttttctctggtcctggacaaagatgtcaaatcggaagttgccatgctgtatcctgagctctacaaggatcttctcaaggttctgttagcttttcagtccctccttcctcctttcctcctttgcttttcccttccttccctccctccctgctttttttctttgaatttatttcacacagaccctccaattctgatttgaacacacttgaactggtagcttttttacttttggggggaaggtgtgggagtttacattttttcttaaagcagtaatatattcactggtataaagaacgtgaaaaagtacagtaatagataaactgaaaacaagccaactcacgacttgcaaaaagcccctgacagttccgctttgcagttgcaacttaacgtttgctcccagagatgttcttgtgtacagttccaaaaagtgtgtgtggtggcgtgtgcctaggcaggtgtataattttatttgtcttcagggttttttacccaagggaaggtttattcccatgtaatgttaattttaatgttaattcyttttttttttttttttgagactaattctcactttgtcacccacgctggagtgtagtggctcgatctcggctcactacaacatccacctcctgggttcaagcgattctcctgcttcagcctcccgagtagctgggattacaggcgtgcaccaccatgcctggctaatttttgtatttttagtaaagaggaggtttcaccatgttggccaggctggtctcaaactcctgacctcaagtgatccacttgcctcagccttccaaagtgctgggattacaggtgtgagccaccatgcctggccaattctttttttaaagaaataattcctccaatgtgttcagatgtgtgcgagccactttattgatgaagacagatgggttgccttatctcgttagygggagaataacgtgaaagctgatggcatgctgcgtgagccccccrcgaaaccggctctaacctttctctgtctctcattcagggacggccgttgtcctacaagacattcttaatatgggttttgattagcatctatcaaggtaaggatgagtggagacacctgtttgtcttgtgctctggtactgactcagggtgtccccttcttgcctgtagaacaagaagagaagaaamgaatctgaaatagcaggaaggagggtggcagtgggacccaggggagaccctgctcaccctgtataaggacttgaacatcagacatgcacagtgctgctgtgtgagaaatgagrtagtgaagccagaggaaggcagtggacagtaatcaaagcctgtggggctgctccactcatgaggcaaaaagcagatgctttctgggatgttctgaaaccttttctgasagtcaggtcaagtcgtagttttggaaaaacatgtttacctcagtggcctccagaggggggtcttcccagactgtggaggcgttgtaagatgacctgttggaatataagaagaaaatagcaaaacttctgtttgtatttatttttcctaactcttttaaatttacatatatatatttatttatttatatatttttgagacacagggcaaagccaccatgcccagaatccttttttagtatttctatttttatgtatgttttgtagtgcacataatagattttatatacttataaaatatattttatataatatgtagaaacagagtgagaccctgggtggcggagggtctcactctgttgcccaggctggagttcagtggagcaatcacggctcgccgtagcctcgacctccccaggctcaggtgatccccctacctcagccttctgagtctgggaccacaggtgtacaccaccaccaaatcagtttccaaatcagttcatttcttcccaatggactgtgagccacgagtccctgcaggtccagcaagatgacctcatgctgtgctgtggatcctgtcgggtgctgacacaggctttaattcctgtctagaaacctgtttctagttcagcatcttagactacaggtgtacaccaccacacccggctaatttttgtattttttgtagagatgaggtctcaccatgttgtgcaggctgatctcaaactcctggactcaagcaattctcttgcctcagcctcacaaagtgttgggattacaggcatgagccactgtgcccggaatcctcactcttttttagtatttccatttttatgtatgttttgtagtacatataatatatttgtgaaatgatcctaatatttctatatatctggacaggtacacatatataacttacaaataaacatgtgtatttggggattattattattactattctgagatggagttttgctcttttgtccaggctggagtgcagtggcgccattttggctcactgcaacctccgccttatggtttcaagcgattctccggcctcagcctcccgaataactgggattacaggcgcccacctaattttagtatttttagtagaggcgggggtttcaccatgttggccaggctggtctcgaactcctgaccttgtgatccgcccaccttggcctcccaaagtgttgggattacaggcgtaagccaccgcgactggctggggtttattatttttttaaaaaataaatttactgttcatgtctcctattggggtttattcttttttttttttttgtaacagagtcttgctgtatcacccaggctggagtgcagtggcacgatctcggcttactgcaacttccacctcccaggtttaagaaattctcgtgcctcagcctcccgagtagctgggactayaggcatgcgcttccacgtccagctaatttttgtatttctagtagagacagggtttcgccatggtggctagtctggtcttgaactcctggcctccagtgatccgcccgcctcagcctcccaaagtgctgattacaggtgtgagtcacgacatcattttattttttatttttttgagacaggggctcactctgtcacccaggctggagtgcagtggtacaatctcagctcactgtaacctccatctcccaggctcaagtgatcctcccacctcagcctcctgagtagctgggactacaggtgcatgccaccatgcctggctaatttttgtattttttgtagagacgggctttcaccttgttgcccaagctggtctcagactcctgagctcaagcaatccacccaccttggcctcccaaattgtgggttttcaggcctgagcccccgcgcctggccgcgactccatcattttaaatattatatttaactttctatttctttcatcaactctagatactcccctccctgccttacttccttttttctccctttttctcactttgtagttaaagattatttatcctacaaggtcaaagaggaaaatcagaaaaccataggttcagacctgcataaagcaccagtcattaacctcatgtaacaagtgatgcctttcatgtctaaatgaaaactgcggaaaggagccaggtgtaggcgagcagcgcacggctttcgcagggagggtgaggggaatacccttctctggtgtttgcagggagcaccatcatgtacggggcgctgctgctgtttgagtcggagttcgtgcacatcgtggccatctccttcacctcgctgatcctcaccgagctgctcatggtggcgctgaccatccagacctggcactggctcatgacagtggcggagctgctcagcctggcctgctacatcgcctccctggtgttcttacacgarttcatcggtaagacccctgaatgcttaaaccccgtccgtcacccccagtgaatctggcccagaggtctcactgccgtatgaaggaaggggggttcccagcgctcggcctgggctcttcctccagcagtccttcccgctcagctgtccacgttttcttaacaggtgttctctagggacaggtggtagttgtgcctcagggtgtgaaattgaggacagagggcgtgattgcagtagacagtgtttttgtttttctttttgagtcggagtcttgctctgtcacctttttkgggccacaaaatctttttgttcccatgaaatcttaatctgaagtccaatctatgaaactgataaaaggggacttgtgatagcaaagtggcagtgctgggaggtgccgagccccagaaccttgcccgtgcagccctgccttgctgctgtgtcctgatagagctcctgagggactccagggatctcagaatacaatctgctgctcctcacagcaaaccaagtgctgaaggtactcgccagttccgtagacgtgggagcacctgccgtgtgccaggattatggtggcagatgaggtggacgggctcgccagggagctgcccttctcgttgggaacacacgataaacacacattaagtgagtgtgagcacaggaatatcagatgtgatcaaagttaccaagaragaaaaatggggtgaggtgctagacgcccaggcacaccccaaataaaaaatgttatggaggccgggcacaatggctcacacctgtaatcccagcattttgggaggcagaggcgggtggatcacgaggtcaggagtttgagaccggtctggtcaacatggtgaaaccccatctctactaaaaatacaaaaatcagcagggcgtggtggcacacacctgtagtcccagctacttgggtggctgaggcagaagaatcgcctgaacccgggaggcgaaggttgcagtgagctgagatcacgccactgcactctagcctgggcgacagagtaagactccatttctaaataaataaataaataaataaataataaaaaatgttatgggaatgtagagatgggggagtgtcagcaccatcctaatgtggggtggtggcagatttctctgacctcagtagtgattccaggtactcttgggcttgtccagcgtcagccactgtctctagatggacaagcctggtttcatcactcttccatgctgacctcacttgctttgccatatcagttaatttcttcccaattgattgagccacaagtccctgcagggccaccaagatgaccccatgctatgctacggaccccatcgggtgctgacacgggctttaattcctgtctagaaacctgtttctagttcaactagaacttgcaacacgggcacggttcagatgatccagcattttctgtgttgtgctgtggatagattctgaactctaatcttggtttcccccgcacggggcaaactcaagccgctatggctttggaacctcagggccaggggtcatcctgaaagtctagctggtttagcagacagtcctctttacacctctttcctcctcagtaggagcatttaattttctgtctgtgttattcaaacaaaaaaccctcaagagtgatactgtttctcctttatcagctgggggagcagggcccggaggctgcttctctgctaagaagctcatgtgtgttcaggattgcaggatagactctctctgggggaaactttcagttaatgacaaccccctcacgccccatcctccgtgggaaacctgcagggcccaggctctctagcaatggcccatcccttgctcctttacctcaggccttctcagtgggggtggtgtggaccccaccgcctggggaacaaacagtggtctttggtggggtgtgaacaaaccctaaccttttacgtataaaggagatgtatatataatattataaacagatacacagtatacctgtgacattaacatgtcatggaggtggtcaattaggagaagaagaaaagtctaaaaatgttccttaaggggcaataacaacaaaaaggcagagaaactcgaccttaccctggaagcatctttgatcgcggctcttttgccagcttccaaagctccttaggaaggttttagtaaaggtaaaagaaacatcccctgaaaagtaaaggtttcacagttgcagccccagtttctagaaaggatttgtgagcatttactgtgcgctccaggaactaaaggagcatccctgtgaacagtggagttttaaagcagtttcacccttgtcactagtctctagaaagcgttttgtgagacctagtatgtgctcaaaggcttgggcctgaggtggtcacagagatgtggcccctgctcaggaagctcagcttgtttgtgatagggacacaccacaggaccgggtcagaggtgtaggaaaaccacagggtgagttgagccttgggcctggcacttagtaggtgctgcctcagtggcagctgcatttcagcatcctgtgctcagaaagtggagaaggggcttattctggcttctgctatattgaaagccacaaactgtcactcctctcttaagaaaacctcataaccgggtttataatcctgcagcaggaaaggcagtacgcccgccccccccaccttccatcagagtccctgagggtcagcttaagcctttctctgacaagggggtctgaacactttgcaccatgacccagaytcatcctgtggctttctgcgaccatcactggaagcagagggtgcatttgaatgtcattttctgctcgccagtggccgggacttagaaagactctccaactgttagacaacaccaaatcaaaagcatctctgagttttcttcccctgtaattttctttccttctttttttctcttttttttgagacagtgtcttattctgttgcccagggtggagtgcggtggtgcaatgttggctcactgcagtctcaagctccccgggctcagatgatcctcccacctcagcctcctgaacagctgggactataggcatgtaccaccatgcctggctagtttttgtattttttgtagagacagggttttgctgtgttgcccaagctggtctcaaactcctgggttcaattcttctgcccgccttggcctcccagagtgctgggattaaggcatgagccactgcatctggtggcccccatagttttcttctcctgggtgttaaaagtagcatttcactgtcaggaagctacagaagagagagcgaggaaaatcaagctgcggcgctgtgtgctcttagccatggtaccttcccttacagtccatggagaaagagggccaatgccaggaggctgtgggtttgtgacgggagatgactttccctttgatagttgtgacgcctgtttctggaccccatgcaccttccggaatattcctgcctgctcactgccgtcttcccctttccttgcagatgtgtacttcatcgccaccttgtcattcttgtggaaagtctccgtcatcactctggtcagctgcctccccctctatgtcctcaagtacctgcgaagacggttctctccccccagctactcaaagctcacatcataggccgtgcgttcgctggagggggccctggtcttggcgcttccctgatggacagagctcaagttccatttatattaaccgccacctgtggattttgcagtaattgctaacacatgcagttttaatgggaagyggctctgcgcctaaacggagtcctaacgctgcatcaacgggagggagggtcctgaaagagacccatctgggcctgtctgaacccctcgttcttcatgtttaggtgaatatgaatatgttaaagctggtggctcagctgggagatttatatgggtcactgtgcgagcttccttatgacttgaattttgttgtcacatgataaaagtttctgtgtagctgaaggttgtagaaggcttgtgtgtgtgtgtgtgtgtgtgtgtgtgtgtgtgtgtgtttttaaagagtcctaatgtgtatgtactctttatgtctttcttgctcttacaaagaggtgtcagaaaaatagaaagctcttggtgtcggtttgggaggaaaagacagtgacatttggtaaaaagttatccacacaataatctccattcggaaatgctcagtatcgtctccagccagccctgcttatccaggttacactggattcctgggatcgtaaccagtaaatgagaggagagggagagagagtgtcctaagtccaatctgttatccttgatctgattcagcatccatagtgtgtgagttaacttcacctgccacctcgtaaaagaatttcagaggtgtgatcccgctttattgggacctggtaacaatcacaaagccagtggctgtttgagaaggacctcagacattttcagcagagttgttttagcaggaaacgtgccactgaatggcccctaaatgtgtcgacagtgtgataagagactcaactaattctttaggcaacatggcagatgtgactcagatcctccaagaccaaagcggaaaggtcagggggctgggactcttctcttccatagaagcctgtttcctgttaggaggcataatggaagatgaccccacaaaggcagaggcatctttcggaacaacactggtggcagctttcagaacaaggaacccctggtgggaggacgcccaagctacagcgttgggatctgggatctgttccactgccggcagatttcaaggggaacttgctgaaaggcagccagtggtgaagatttctcccctcccaggatggactacatgccrgcatgtttcttataaagctgtggctgcttgtttcagaggaagggagtttgcagtcgcgggacgtggtagagcaaggcattcttgggttttcaagttgcttcttgcagaagccacatatgcatgccataagggttaagttggtggatctttaagagccaagtgtggttgagatcttggatttgcgtttacttcttgatgaatacatatccttcaaaccctctgcctggcgctacttctgtgtgcttcagagakgtacatcacagcctggtttctgatgcctactaactcctgctcttggagagctggagacacgaggatcagatagtcccttgcctttggagcactcttgataagcttttgtattttgtgttgtccttttaaaatgttctagaatgactttacgttgcaggtactggttaattggctgttgacaccacatctattttgtcttatgattctgcagttttgcagtacttttctctatctgattcagccatttctgccagagggaaaaggtcggcagaaaagatgtattgagtgaatagttaaggataggatctttgtccaaaaatttcagaaagattgagcaaatctgacgtattcattgagtgagtttctgtgttttcaaaggtggaggagaaatttgtgctggaagtttttaagcctccgttttcttggaaatcagtctgtaacactggcaagtcttaagatagtcccrtttagactttgcagatgctgaacctggctctgtaacgctgggaagtcttaagatagtcctgtttagactttgcaaaccctgtacctggctttgctcggagattcgggatgctggctcctgcaggcagggcgtgtgggagcctcgtcagaaagttttagaggtttccagcagaagcagaatgaagatggtctccctggccttttccttaattctcaattttgattgaggtgcacaagttgacttttaaagccaacgcttaagatactgattgacatcttcaagggagaatgctcccaggaggggctgaagaagccatagttggaagtggaaggtactcgtcagtgttcwccacaaacctttttactctgttgtctcagccgcactggggcggaggcggtcaagggtgagaagtaccgacactcaagtgcaaactgccacgtcgttggcccatcccatcagtgggcagctggctgacgccattcactggacggtccctgaacacctaggaatgcacacaccgtgcttctcagacactggagacgcaaaggcaggaggatgcagtccggtgagaggacacgatctttacctgcacaatcagactgtaagcccagcagagaaccccaggggcgcctgggtacttctcggaggtcatcttagttgtggtggggaagacaaagaaataagcaaacaagaaactagagttactatacaagaaactctcctgagtttgtaaaccttaagcataaggattcagttgacctttttcttggttcatcaatctggaaagaacttacataaagcgccattgacactgtcacctgggagctccatgggccgtaagtctttgacagccaatttaatttgaggtcagagggccttgaggtacacagtcagcactgtttgaacacttttcctgaaagcaaaactcacagctccctgcgccctctgacaacactagctatttctgccagagtaagaacttctattactattttattattgttcatatgtcttttgatgatggttgtgtgacagggggaagcaggatctatttggtttcttccccctccccccaccccttcctttttgtctctctttttttttytctaagaaaatcaccagactagtttttccatcttgagtaatttcttatgtgggacagttttgatcctcattttgaaagcatgcgtgygcacatgtgtgttgcctgtggtgccaggtgagacaggtggcactaactccagctgcttggaaggcatcccaagggcgcatcttaaagttggagcagacctcccttttccagcccctggggccattagaccacgtgctggaactagcattgtaaaattcccatcccagttccactcccctgaagtgaaacccttttttttttgtgacagtaaatcttaaaaatcattgtctctttatgaacatttcctcagtttcttctctgctgaaaatgtaagccatgctactttttaatgtattttgaattttgtgctcattggaaattgatatgctaatgcctcccccaccccccgccagacttttctttttatactttgtcttgtttttactggggtaggctgggcatgcgtgcgtgcctttagggcagcattttaaacctttgccaaaattgcaaatgggacatgtacattcttctgctccatcctacttaaacacctatcagctatttttatctttaaccttttctgtatgtttgaagtgtgtggggggtgtgtgtgtgtgtgaaagagcgagagaatgatgtcatctaaagttttttgaagaattatttggttttcattgcattaaaattctatcactcccagctttgttttcatttaaaaaaatatacaaagagctttgtaaatacaacacattttatttctcccccttcttttaatgtacagcttttttgccacttatatatacttaaaatattcccatgaattatgtccagttcttcttggaaaaaaatttggttttgaatgaacctgcaaagcatcctgcagcgtgagcagctcctccacctggagctccgaagcatcttctcaggccaaagcggcattacccgtgaatctgtcttctccgccacrgcatggtttgaggcgcagtctgttaatatagctgggccatgtcagtgactgttgtgtttgtggggtcaggtggggggcatggtatttgcaaaaaaaacaaattatggctaatttattattttgttgcagtggggttaactgtaaactcatgtaagagtctgtgatttcctcaytggttgatctctctctctgtaatcctcattgcaaattttcaccaggacagcgttttttgattagaggggagctctggcacagtatgctttaatttagcaggaacttccagatgatttaaattctcgatgctgtgatgacacacatatgatctttcgtgtttytgagcgactctactttcattgtttgccagcgtggctcgttgctgttgcccaataaagcttgtgtacgttctgccttgggggattattttaatttgtacagaaacatgaattctggtatcaaaatgaggactttytattataacgctcctattttttctttatttcatggtacatgaaatgtaaagaaaactctttccagttcagaaaattattttgattttggcaaaaaaaaccccaaatcaatgcatgttatttattattttgtactattgtccatcccagacgtgtcagaatttcaaaaggtgatagatataaatggaaaataagatgaaaaccataagcttcatattgtatttctatacacggtcctcgatgactggaatcttttttttttttttttatcgagggatggaacatataggaacagtcagttaagttttaggcagaaaaaatttttaaggcccggcgcagtggctcatgtctgtaatcccagctttgggagaccaaggcaggaggattgcttgagcccagagtttgagaccagcctgggtaacgtggtgaaactcatgtacaaaaaatacaagaaaacgagctgggtgtactggctcaagcctgtggtcccagcgacttgggaagctgaggcggaacaatcacctgagcctcggaggtcgaggctgcagtgagtcgtgattgtgccactgcactcctgcctgggcaacagagcaagactccgtctcaaaacaaaacaaaacaaaaaaagcttttgtgtaggaagtagttgaaatcaattgggtgatttttgtcccttgggggacacgtggcggtatgaagaccttttcagttgttacaactcggggaagaggagtgctacaagcaagagatgctgccgaacaccctgtgattcacagggtggcccccacaacagagcccaaagtgtcaaaagtgccaacattgagaaaccctaattattttttttcgaggtggagtcttgccctgttatctaggctgcaatgcagtggtgcaatcttggctcactgcaacctccgcctcccaggttcaggcgattctcctgcctcagccttctgagtagctgggcctgccaccacgcccggttaagttttgtatctttagtagagacggggtttcaccatgttggccaggctggtctcgaactccaggcctcaggtgatctgcctgcctcagcctcccaaagtgctgggattacaggcatgagcccatacgcccagccagagaaaccctaatttaattggcacgtgtcagctgtaccatttgtctgtctgtatttgtaaaagggcccggaggtataagctcgtgtgtctcaggaagcaagttatgcctccgcctactataccaaatactataccaaatggtgtaattagtggctgtctgcagtgtgagctgctggttccctctttttggttctcaatggaaagggccatcctcagtatatagattagaaagataattgtaacttagttgtgttatctcatgacagcagcaaaaggaaggtatgtggtttcaaaggtagggaccgaccatgctttcccttaaacgtgtgctatccctgcacgaccttaagcctctgcatttgcctgcagtgaacttccgtccatgtgcggacactcctccgccggagccgctagggggaacttgaggactgaaagacattgctgtttcctgttttccacaaccagccggaccccacgtgcccaactgccctgagtttcaagactgtgctttcatagcttcagaatttatttcatggccagaggctccgtgaaaaacagacatttcttttcatgttgttgaccagaatattttgctggacttagttaaaaaaaaaaaaaaggaaaaaaaaaaggcagggagggtgagagatgaatatttatttgctcttggatatttgcatttttgaataattggcaagtaggaagctttgccaattcactgttcagtctaataaggttttgagacgaaatgtaccaacaccccaagtacttttagtgtttttgttatgaaacttttcagggtgacatgaagccctgtggtatttgtgaggaggtctataaatgatggatttgctcacctcaaaatagaactgtagtcgctccaaattttccagaagtgggagcacagtgacagaattcattcaggacttgctaatttcctactttaaatgggttacataacagaaccggtcccgccttcgcgcctctcaaaactacccatgaagtgatggtgaaatgtatcattaaaagctagaaatagctctgctaaactctgggaaaaagatgaatttttttctgatctccctctccccaccccccttttttcacccaaacattgcataatgttaaaaaagtcaaatctttccgtgggatttaatttcattttccatgtggctgtggtcggaggggtaactcaagcactttgggggctggtggatttttggaggatcacgcattcccggatcagtttgcatccaaagccttagccgagaaatacacccaatcctggggtttctccccatccctcctgccccccttttgtggatgagttatctataacatagcatcttttcagaaagcctgccttcttgcaggaatgcccaaacaaagccaccctccactttccatgttgacgttttgattttgaaatggattccccctgaaatttggggtaactgagtcacatgtgaagtcatcggccccacaacctatgcttgataccaagccagggctcatttcttagaattcagccagcaggttctgtttgcttacattaagaacttggtgttctaagcctgtggtgtttgttttcaagagatttaaaagaaatacattttttttctttgatcagatcaggtccagataagcccaggactattttttatttcctttgagaaagattgcagagtccagaaggaatggaaaaagtgttgggggatgggtaggagatgtgcagaatatgctgacatttttattccttcattgatcaaatatttgctgagcacttcctatgtgttaggcactgttcttggggctggaggcgtggcagggaaccagacaagcgtagtgtctgccctcatagtgattacactctgtgtgtgtgtgtgtgtatgtgtgtgaaagacaataaacagattaagactaacatcaggtggagagaaagcttcctaagataaagcagcctaagggttaggcagaggatgacaaccaggtaggaataaaggtggggaaagtgctgggagtcagagatgggcccactggagcagagggctgcaggatgagaaggagggtgctgtgcacctctggaccctgtaagagcagaagctggtagtgatgccccccaacctatccatgtgggtgccagccacaccgtccccctcaattttctcatgccttgtggggtttttttttttaatctcaaggaaattctgctttctattccattagtggatttaatgtaaaaaaaaaagtttttaatgattggccaattctattctccaagatccccaagtaaatggattcttttttttttttttttttttgagacagagtcttgcattgtcacccaggctggagtgcagtggcacgatcttgggtcactgcaacctctgcctcccaggttcaagcaattctcctgcttcaacctcccgagtagctgggattacaggcacgtgccaccacacctggctaattttggtatttttagtagaggcggggtttcaccatgttggccaggctggtctcaaactcctgatctcaagtgatctgcctgccttggcctcccgaagtgttggaattacaggcatgagccaccgtgcccagccagtcaatggattcttgaggagtccctttgctttctccttgggctgccccatgaggggtatgttctctagtcagggatgcccaggccagcctagcatactggggggaggttcatttctaactttgaacaatggctaaggccacaggaccctgggcaagtttgcaaaggcagagcgtcattcagagagatctggggaagtgacattgtggttgcagtgtgtgcaaaggccccggggtaggaaaggctgggcatgtcggaggggcacagggctggagtgctgagaccgagggggtggggcatggaggaggtgaggtcagggagatagggagggcctgcagaccttggcattcggactaaagagtccgttgcagaacgagcaagcattattaaagttagccctctacactgaaccatgttcgagggcccctttcactccttctcttctaccccgcctcaccgaccctttcccacctgttctcatttctgcgtctatgtccgaggaggctcaggtgcaaccctttccattggaaccaacccactcccatgcccagtggttctgcatgactttattgacataaccacactagtaaataaaggagagaagaagccagtccttggatgaagtttcctcttgcttttccagcgaatgatacgatgggtctctgttcagccctgtagcctggggtgcttttggcagaggtgccttttccttcgacagtcctggaaagcaggctgcataaaccagctgcctagaactgggaggtgagtgcggaggaagaataggtagagaaaacttaactggctcatgttcttcgaagctgccacatttcccgaatatgcccacttgggtcagatttcgaaggcgaagccttttgcagtcatgaactgcgggagcccaggctgtgttcaaattcctccggaagaaagaaagaataaacgagaacaggctgtggaaaagaatgtagttagtgtcttaaagatggccaaatattcattctcatttgtccttttatatgaaacagatttttaaaaaggcaattggagtagctaatgacatccagaaccccgttgattcgagtggggctgggggtgggggcttaaattggcccaaacagctaatcaggccgaaagaaagaggtgagttgattaccctggaaattgcacaggaattcttcaaagatgtggccaataattagagtttaagatgctactctttatgcacataacttagcataattttattaggcagctcatcaccaacagaattagtgaaaatcaggccagaaaaaatctgagagccaggcttatgcagacrtggaggcttttgctctaaaatggtctgctcacgcttggggaagaccccaagagaaagcactacctttcttctgggccctgagcgggttgggagtggaaatgaatcagagccatttcagggggctgtgctggagttggggacaatgtggcctggacctagctgggacggacacagacttggtttgaacaccagtttccccacttactggtgagtgagatggggccaattccttaaattctgacctcccattccttgcctgtttttgggagcaggaaccccatttgtgaggatcagccatgaggctgatggcattggaagcagtgcagatatagaaacagtagctgtcattatcactcgaggctgctgctgatggagggaggcctggtctccaccaagctcaaaagcccttcatcagaatgggtttatgctactgtttcccccaaacactgcagtcacctggctggctagagttcttagaagatttcaaagtttgggggcagaggcaatgtccaaccttgaatcttttttttttttttttttgagacagagtctcactctgtagtccagatgcccaggctggtgtgcagtagcgagatcttggctcactgcaacctctgcctcccggggttaagagattcttgtgcctcagcctcccaaataggtggaactacaggtgtgtgccagcatatctggctaatttttgtatacttagtagagatgaggtttcaccatgttggccaggctggtctcgattgcctgacctcaggtgatccacctgcctcggcctcccaaagtgctgggattacaggtgtgagccactgcaccyggcctcgaccttgaatctctctgtgcacctttcatggatttgcaaacttgcccagggtcctgtggccccagccgtggttctcagttggaggtgaacctgcctccagtatgctgggctggcctgggcatccctgactggagaatgtacctgtcatggggcaggggacatacagacaaaggagaaggcaaagggactcctcaagaatccatttcctcagggatctggaagggagaatgaaagtcatagaattggccaatcattaaaaacttctctttttacattaaaacaaacttattaatataatagaaagcagaatttacttgtgttaaaaaaatatagct

SEQ ID NO: 95737 - DNA, 44212 bp, Homo sapiens
  misc_feature (1)...(44212): n = A,T,C or G
acattaggacacatttgaatacagtttaaacattaaaagatgggtctccggcttttttggatgattggaggatctggcaacactggatttatgtttcagcacagcagcatcttgacgaggcatttgctctctcctttccacaatccccacctctcccattgtgtgaggatgttcttctcctcctatgagcgaggcgtgtctatggtttatcctattaattagtatgtatatgttatccccactacacagatgagaaaatcaaggctcaaaacaactttcccaaagccacagagctgtaagtggtggagctgaggctcctgatcatatacattttgatcttgatttttatttatttatttgagacagagtctccctctgtggcccagagggattctcatgcctcagcctcccgagtagctgggattacgggtgcatgccaccatgcccggctaatttttgtatttttagtagagatggggtttcaccatgttggccaggctggtctcaaactcctgacctcaggtgatccgcccgcctcggcctcccaaagtcctgggatgacaggtgtgagccactgcgcttggcctggaatagatcttgaactagatttttcaggagggctacattggaggtagagagacattctcaaacatacacaatctctgttgtcttctcacaggagtggcgtgctgtgtggataatgaatattggggaaggcatctctctccagcccctctcaagctttctgtagtcactggtccactctgtattgctatgaagaagctcaagaccagcctgtatcactcggggtcctggcaggaaccaggtgccacactcaaactgagtaattgaagagggtttaatatgggagttatttacataggtgtgggctggtgtagctgcccatatgccctcaaaatcacctctacatggcaatagctacttactgctaacagagtctctctctcattgctgcaaatattttctagccatgcaagaaactcagccggtcatgttgaacaaactaagagtgccaggaagttaatgtcctggaagcattgccagaggggagggggcagttagattccccagcttcctcgctcctctgctgggttaagcctgcaacatattcatcatctcccagagtgctgcccggggatagagctccaggtgctcagtgtggtgacctgctcatgtcagcttcttcccctttcctgtcttgtttcgcacccacatccttcccatgtttcctcttcccaaataaactacttgcattgaaatctttgtctcaggctctgcttctggggaaacctgaacctagcgaggagagtttaaggaaagcaacaaagggtggcgtgggactctggtaacaaagggaaccactgcctttcaagaaaacggcaggaggccaggcacggtagctcatgcctgtaacgccaacactttgggaggccaaggtgggtggattatttgaggtcaggagttcaagaccagcctggccaacatggtaaaaccaagtttctactaaaaatacaaaaattagccgggcatagtggtgggtgcctgtaattccagctactccagaggctgaggcatgagaattgcttgagcccaggaggtggaggttgcagtgagctgggattgcaccactgcactccaccctgggcgacagagtgagactctgtctcaaaatcaatcaatcaatcaataggcaagagggaatctggaatggggagggtatggagaggtgggccaggaggactgacaggagatgtggccttggtagagagacacagtcagcccagtgactgtgcaccgagggaaagggggaatgaatatcctgacctctctcctctcatctgctgttctcctgctggtgctccctgttgacaaaacccaaccagagccagagggcaggagagcccattggtctcacccacagcagcatggctgccggacacagaggagcagagcagcgtgcagaagggtggagagtgcacctgcaggggcaaacagaagaactgcatcacgcagcctggccctttggatctgacccatttggaatgcagaattttgatagtctaggatctgggtaaagggttttccaggtgtcaggatggaagtgactaaggtgcagaggctggagggctggggcaggtagaagcaagcattcctgttacctactgctgtgtgacaatctccccctaaaacacaatggcttaaaataacatccatttcattacatatctcaatactataggtcaggaatttgggctgggcttacttgggtaattcttctgtcccacatggcattgaccaaagcctggttttcagtgggcagctgggctggatggcccaacacagcttcgctaacatgattgctgtcttcgtagggatggtggaagcctgggctcagtgggactgtcaactggaatggccatatgtggactctcttagcatgatggtctcttctagaagcttgggttcccagagagaatgttcaagaggccccaaaggacaccacaaagcttctttatgaccaaggctcggaaatccaggaagcttgctcccatcacgctctattactccaacaagtcactcaggccagcccaggtccaagaggaggaaacctagactccatcttgcaatgtgaagaattgcaaataatttgtgtcaccctaaagcaaccagcaactcatctaggttgattggcatttcagcaatgtggtgggaagtggtgggactgatgttgaagagggacttgaatgtcatgagaggctggggaggcaataaggtggggagtgaagtttctcgagtcagattcaaatttaaaccccagttttgccacttacaacccatgagccaagcaggctgtctctctatctgaacctcagtgtcctcatctgtaaaatgaggagaacacctcctacatctgaggatgactgtaaagatgaaatgggatgggtgcttataaagtgcttcccagtgtacctggctccaaacctgtctcagtaaatggcagcccctattattgaacccgagtaacacagagagccaagaaaggatcttacaaaaaactcccctggctttgacaatgtatgagacccactgatagggtttggctttgtgtcctcacccaaatctcatctagtagctcccataattcctacatgttgtgggagagactcggcgggagataattgaatcatgggggatggtctttcccatgctgttcttgtgatagtaaataagtctcacaagatctgatggttttaaaaatgggagtttccctgcaggcgctctctctttgtctactgccatccatgtaagacgtgacttgctcctcctttgccttctgccatgattgcaaggcctccccaccattgtggaactgtaagtctattaaagcctctttcttttgtaaattacccagtctcaggtatgtcttttttttttttttcatgagatggagtttcgctcttgttgcccaggctggaatgcaatggtgtaatcttggctcaccacaacctccacctcccaggttcaagcgattctcctgcctcagcctcccgagtagctgggattacagtcatacaccaccacgcctggctaattttgtatttttttttttttttttagtagagacggggtttcaccatgttggtcaggctggtctcaaactcccgacctcaggtgatcctcctgccttggcctcccaaagtcctgggattacaggcatgaaccactgcgcccaggctcgggtatgtcttcatcagtagcatgaaaataatggactaatacagccaccctctccctcactcccacatacaaccaaaccccaaatccagctgattttacaccctaaatgcagcttgaatatgagtttctccacttcccccactgacatcactatgccctacccagaccatggcagttgcctccttcctggtatcctgtcctccctcacccccgctggccccctgtaatgccctcccctcacagcagggagcccaggcttctcaaagtgccctgtgggtgcgaaccacctgggggtcctgtttgtataaaatacagattctacttcagtaggtctgggatggggtctgaaagtctgcatttgtagtcagctcccaggtgatgtgggtgctgatgatccctggatcacactttcagtagctggagaatattttttccaaataaaagggtgattttgtctcgcctccacttaaaacactccactgacttcctaggaatcccacaccatcgctgggtcccacatccctggcaggattcagctcccatcagaccttctagccccttgctctccactctcccactctctctttcccccttgtttatgggtttgttaatttatttatgatgaaatgaaatgaagctaccatccaccccagtactggaacattatcaataacctgtgtgtggccaggcgtggtggctcatgcctgtaatcacgccttgggaagccgaggtgggtggatcatgtgaggtcaggtgttcgagaccagcctggccaacatggtgaaaccccgtctctactacaaatccaaaacttagcagggcacggtgccacgcgcctgtaatcccagctactcgggacgctgaggccgagaactgcttaaaatccaggaggtggaggttgcagtgagccgagatttcgccactgcactccagcctgggcgacagagcaagagtccatctcaaaaaaacaaaaacaaaaacaaaaaaacaaaaaacaaaaattagccaggcgtggttgtgggcgcctataatcccagctactcgggaggctgagacaggaaaatcgcttgaaacgctgggggtgcgggggggcggtggggaggaggcgggccagaggggcagaggttgcagtgagcccagatcgcgccacttcactgcagcctccgcgaaagagcgaaactccgtctcagtaaataaataaataaataaataaataaataaataaataaataaataacctgtacccgcgtgttatttccctccgtccttacctcctcccggctccttccctttcacctgagataaccactcttctcgtatctatgctcatctttcccttgctttacattttttccaccgatgcatgtgtctaaacatacatacttttggttttgcttttacacattctaaaagttgcaccattgtatgcagttttccgcaacttagtttttttcactcaacattgtttctgagacattgtttctgttgttgtctggctgaagttcattccgtttcactgctgtctaacgtttcatggtgtgaatattccggtttatttgcccactcgcccgtggaggggcatttgagggtgtttccaatgttcctgttattcggaatagcgctggtgtgaacattctgcacaggtctctggctgcgcctgggcgggtttcttaaaggtgaatgcccaggaggggactgtctgtgttctccctccctccgagctccagccttcctcgcctcctttcactcccagctccctggagtctctcacgtagaatgtcctctccacccccacccacccctgatgaactcctgcaggttctgcaggccacggctggcccccctcgaaagttccttaactatacaattatggtgtgtgtttctgcgacgagcgtccgtctatccggtggaaggcacgccgctcgaggcttgcgatgctcccggggtccccgcttctagcttgggcctggcgcacagcagcgcccagactgcagggggacgcttgaaagttgctggaggagccggggggaaggcagcgcccagcgaggcggctggagcgcgcgcccacaggtgggtccggtcgggcgccgcggggccgtagttttcgggtcggcgggcgaggacgccgggtccagaattccaggaaatgcgcgatccaggccggcgggcggggcgggggctccggcgagagggcgggccccgggaacggcggcgggcggggcgggaggcggggcccggcccgttaagaagagcgtggccggccgcggccaccgctggccccagggaaagccgagcggccaccgagccggcagagacccaccgagcggcggcggagggagcagcgccggggcgcacgagggcaccatggcccagacgcccgccttcgacaagcccaaagtgagcgcgcgcgggggctccggggacgggggtccggcgcctgggcggcccgaggggcttagcggggcccagcccggggcgtccaaaccctgggaacgaacgggggctcctgcaggcgagttcttccttcggcttaggccgtggcttgcttgcgggctaatcagggacaatggggcagagaaggtccagaacccggaggcctccagagtctgcttctgcccctgacttgacccctctgggtctcagtttcgctgtctgtcaagtgggcatcctagcaccgctgagcgctgtgtgggcctgggcagggacttgaggtctctgaagctcagctgtatgatcaggcccgatgtctacgccggatagssacctagtgctgtgcccsgcgcctactgagtgctcagtgaatggaagcagctttgtacgccagcgttatggtggtgagcgccaaggagctcaggtttgtggatgcgccccggggaagaaccgtgagccctgccagaaaggggagggaggggagcagagcaccccccttcccccgcgcgggaagaacaggagctaggtaggccctgggtttggggccctagcagggttcactcgaggccaagccatggccactggccccaggggagaatccccttgtttctccgcccaccagctgtggcgtcttgggactgttggggtcagggagggtctggacccccttggcctgtckcagagtccgagaggaggggcccaggagtctgccaagcagggtgagtcagccagtagggtgtgagagtggttggggaaggagtcagctgcagtcagcctcaacttacccttctaagaaataggtgtgagtggcccaggaggttggctcacgcctgtaatcccagcactttgtgaggctgaggcgggaggatcatttgagtccaggagtttgagactagcctggacaacaaaactagaccccgtctctccaaaaaataaaaaaagttaggggaagtgtgtgtggtggtgcactcccgtagtcccagctactcaggaggctgaggcgggaggatcgcttgagcccaggaggytgaggctgcagtgaggtgtgatggtgccactgcmcttcagcytgggagacagagcgagaccctgtctcaaaaaaaagagaagaaaaagaaaagaaaagaaataggtgtgaatgatgatgacagctatcacaaaagtgccggtgagaatccagtgagtgtgcatgtgtcagtgagggagacaggctgtggagagcccacctaccttctgaggagggtgaggcctggcccccactactgatgcccccagcccagggaaaatgctcagctactccccgtcagaagctggaassactgaggtgctgtacaagccctcctacccccacccctgcctccttcacgtcttactggagctggggcccatgattggcgcctcccctttgcagtctttttattaaatgctctgggctccctctgcccttgggctggggacccactgtaccctgatgtgaatcctatggcartagcaaagctctttgattggcggggtgcagtggctcacgcctrtaatcccagcactttgggaggcaaaggtgggtggatcatgaggccaggagttcgagaccagcctggccaacatggcaaaaccccatttctactaaaaatayaaaaaattagctgggcatggtggcgggcgcctgtagtcccagctacgcagaaggctgaggcaggagaatggcataaacccrggaggtggagcttgcagtgagccgagatctcgccattgcactccagcctgggtgacagagtgagackctgtctcaaaaaaaaaaaaaaaaaaaaaaaggctccttgattgcgaacatgttgggagttatggagagaacagcagggcccacttctagagcacttgttgcagacacccattggatccttgcagttcttctgtaacagcccatcaagggaggggctcatattattatccccattttttggccttgctcagtcctcccatctgattcaagctggcagatcattttccctattgggacctcagtgtccacacctggaggatggaacatcagctgcttatgtgggtgtcccgtgtcctgagtcccaaggccacaaggtgatgcttgagagtgaaggtagaatgttacctgccatgtgtttgaggcgtgacaaatcttgtatgattgtgaggaggaacttgtgtgagctggcaggagaagtgggaaggagtgtgaatctcagagccactgtgaccagagccagctccctgccctcttgtgggagggacagatgacagttataattattagcattactagctgcagctaatggagtgttgatgtttctgtgccaggcaccgttctaaacacattatctgcattttttatttaatccaggcacagagaggttaactaggcccaagatcacacagctaggaaatgtccaatctggggtttgagtccaagggaggctggcttcgaaatcccatgcctctaaccatctttcctaaactacctctgcagaagcctttggggatagaggtgccagtgccccaggtgcaaacctcctgagacaggagcctttgctgtgtccttcagcttctcatacctgccaccagctgaggcctgggacctggtcagctagaagaaagcagagcagggcagcgcttttcaaactgcactcaagtggcctgacttttaatgttcacactgtgattctgtgtgggtcgggttggggcctgcgatgctgcactgctgaccagctcccaggaaatgctaatgtcaacgatccaggaacacactttgcttagcaaggccctaggcagctgccttctgttgtgcgggacccctattgactccaatggatatagcaccaggttcaagaggctaccttctttggaagaggtagcaaacaagatacggggttttactgggggcttagacacagggaagagagtccagtggcggcagactgagcagaagaaccgcaaccacttgcaaatcatgcagtttatgtagcattttcatttaacaccttctcccaaccatctccacctagtaaccttcatttaacccaaaacaaagggcctcggtccctatacccctgtatggtcagtgtcccgtgggaatggggtggggctcagatgttcctcatagataacgactggatctccaggttggccactcttggattccttcgctcagaactctgaacacccattcaagtgtgcctgccatgcagggtcatcgtcaggggatgcccaagtcaagtttgccctgtcgggtgtgcctcccatacccccacctggtttgacttagcacctgctgggcactggaagaagtgsaaaggggggttgcaggggtggcccttatcagcctatgttcacaggtggcaccaggcactcaggcattctgcatcctggaggccagtgctgatcacatgcctgttacaataatcataacaatagctgtccttgaagtagtcctgggtaccaggtgccttcagtgactttttcttytttgccagaatctcactctgtcgcccaagctggagtgcagtggcaagattttgggtccctgcaacctctgcctcctgggttcatgcgatcctcctgcctcagcctcccaagtagctgggactacaggcgtgtgccgcagtctcactctgttgcccaggctggagtgcagtggtgtgatcctggctcactacaacctccacctcccgagttcaagccattcttctgcctcagcctccggagtagctgggattacaggsgtccaccaccacgcccggctaatttttgtatttttagtagagacagggtttcaccacgttagccagctggtctcgaactcctgatctcaggtgatcctcccaccttggcttcccaaagcgctgggattacaggtgtgagccactgtgcccggctagtaacttttatctcacggaatcctctggaygacttgacaaggcatgggtcttcatccccatttacagatgaagaaactgaagcttagggagtggagggacttgccagggctacacaaaatctgagagccttgaagctgtagactggcaagtgaacmggtacaggctgggacagcagtttctttctttttttctttttttagacagagtttcgctcttgttgcccaggctggagtgcaatggcacgacctcggctcactgcaaccttcgcctcccaggttcaagtgattcttctgcctcagcctcccaagtagctggaattacaggcatgcaccaccatgcccrgctaattttttgtatttttagtagagacggggtttctccttgttggccaggctggtctcgaactcccgacttcaggtgatccgcccacctcagyctcccaaagtgccgggattacaggcatgagccaccgcacccggccaagggacagcagtttctaaactgtccctctctgatgcagaggggaattggggctaaatcagcaatgtgccttttctgtctcatatttgaatgtctactctgcacgaggcgctgtcctgctttgcatacagtgactcatttaatgtttatgtcagccctctgaggaaggtcctgtcctattattaacttcacttattatgaggaaactgagactcagagaggggagggaacttgccaaagtcacacagctggcaagcagcagagctagacttgaacccagatctgcctgcactcaagtagaagctgttcattgctttgctcatttgccaattccactttatgcaaaaaagagggggcagtgtggggggaagagttagaatcagggtggcagggtgggccagtgcattagccctgggcttcagatgtactggggttgaattcctgcctgccgcttagcagctagggtacctcaggtagacaactcctgaaactcagcttccccctctgtaaaatggggtgacaaaaccaagatcttggggttcttggggaaactgacatgctgattggtttttgtacagtgcctggctggtaacagcaggccctcaggggtgcgtttccttcctggggactggagtgggggttgcagtagactctgggaggcctctccagctgcagaatctccctcctccctcctcctttttgtcttcctgacacaaaacccaccagctgcacttctttgggcttgcagtggctttcagttaccagagccacctgttaaaacaaaaatgtgcctrggaagagcctgccttacccattttgactcacatggcagttggtggtggaggggaacaaaggagactgagtttcatcgaagccttttgcttcggaggaggaagggaggatcagagagaggaagtggtctgtgttcacacagggaggcaggggaggccaggcagcttcccaatcctgcattcaacctcagggtgggcttgacctgggtggctgggggccctgtgatccaggagagacttgtccacctgctcaggtgtcttgaaggggtccctgtggtaccccctggggcggggcaaggtagtaggaccatggtctggctggggaggtggagaggagcaggctgtgggcgcagagtgaggttggaatctgtatttacccaaggtgttgggggtaggcttgccctcagcccttaatgttctcaggcccctgagcagttgtgggggataacctctgcactcctagtgaccagggagctagaacagcaaggaatttgaacttggacaccagctggggtcaggctctctgggtctgagtcctgatttcccactttccagctagaggagcttgaatgagtcatttaacttcayggtgcctcagtttcccctctctaaaatgagaattatacccatacccacctctcaaacaccaagtgcaggcctggctcagagcaggtgctgcagcaatagctgccattggtcagcatcatcatcatggttggtaatggtcctrctttgacttttgagacagagtctcactctgtcgcccaggctggagtgcagtggtgcaatctcggctcactacaacctctgcctcccgggttcaagtgattcttctgcctcagtctcccaagtagttgggattacaggtgtgcgccaccatgcctggctaatttttgtgtttttagtagagacagggtttcaccatgttggccataacaatggctgtccttgaagtagtcctgggtaccaggtgmcttcagtgactttttttttttttttttttttgagctggagtcttcctctgtcacccaagctggagtgcagtggcacgattttggctcactgcaacctctgcctcctgggttcatgcgatcctcctgcctcagcctcccaagtagctgggacttgggatacacttgcccycgctgrtcctcccttccacctctgtgaagaggaggtctcaaactcctggcctcaagtgatccacccrcctcagcctcccaaagtgctgggatttcaagagtgagccaccgcacctggcccctgtttagatgttagcatcagtgacccagcaccttgctatgtggcatgmagggagcgtgctgctagacctccgggtttagagtcaaatagcttcctggctgtggtrtgcattagactttctaactcaaggtcctcccactctctgagcctcagtcttgttgcctttaaaacgagtttaagtgtgctgagtccctatgctgtggctccacaggaatttcccsaggtggaagacacatcttgccttctgtgaaacctctcagcagcagagctgtcaggccccgtcagcaggagacactgtggggactgctcagtcccttccactgtgtacctcggagctggcggagcctagatgaggctgagcatagagggcttcctggaggaagtggagctgaaacagtttctcagcccagggctgctctgtctcctggcctcacactaaaagtcagttgagaggccatagtggcataagtcactgaccctggcactgcccagctcatcaccaaaagcagggctagggagggaggggacattcgattggcagtgggcacctgtggctcatctgggttctggccacggtgctcaggttctgtgagctgaccaggcagccctggctcctctgcccccgtgtgggttctgccaggtcccatgggggcaggtcagccccttccttgttgcagggagagcacccagcattgctgacatgggacagggaaacgaggaaataacggtgtggtcattgaacacagagagcactaggtgctgtgcgaggtgctgaggacacgacatgatgacacagacaaggtcccccctctcagcaaacggctcatgagggagacagacatgttacatacatgaacccaaaaagtcagacgaaaacaaaacagagcgatgtgtttgggaggcaaacccaactgccggaggcgagcagggcgtctacctccaaggtaaacccagtcagattagttgtccccaaggctcaccagggagaactaatctgactaggtttgccttggaggtagacggccctgctcgccctccagcagttgggaacgtggaaacatgagtcagatctgggagtatctgtcccaggagtccaagacctgggtcctcatggtagctctgccaccgacacactgagtgaccttgggtaagtgarcccaccgccctggacctctctggcacgcatctcttgagagcagggacttagtgcatttcccgagggcctccacggtgcctggcacatagtggggcttagtaaatatttgttggtaactgaggatgcttcctgttcacatcagcgctgggaggatttcctgctgttcagacaaatgctgggctggctgtgagtcagccttgcagagagcaaaggcagtgggaaggggcgtgagattcccctctggagmggtcaggaggccaggcactgtctcgacatgagtgccagggagggggtgtggcctgtgggcagggcttgggctgaggcagagggacttgagttccaccctagctctaccaccatcaattttgtgtaactctggacaggccactgaacttctccgggcttagcctggcaagtccatttccccatctgtaacatgggccgatatgtacattgcctagggattaaatgagataaagggtctgaaaacagtaggtagctgctttatcattattattatttctgtattattgatgtctgaggctaggcccacagaggcagtacagtagagtggttaggagctcaagaatcagactagggttcaaattctgactccatcactgactgttttggggtacttctttgaacctcagtttcttcatcagtaaaatgggagtgaagtctctaccttgctggttgtaaggatgaaataagataatgcatatagatggtctagcacatagtagatactcaaaagtttgaggccactgctgacccttttccctgaaaggagacaggagagcggggtcgccaccccattgtcattgtcatctggaataggctgacagacttcccatggtgtgttgcagttttctagaaaattcagtaggaggcctgcctgagcttgagccacctgtggaggtggcttcctgcctctgctccacacctgaaacgcgtctgggcctcttctcaggcagccgtgagaagggatgagtgctactrgtcmtggtgggcagctggctctgctttcccccttcccagaggcgctcctgcctcctgcccagctccctgaacccctagcttctgcaccccggcactgtctggcttctgccccgctgagcacccactgtctctgacgctgccttgagtacttcccgcatgttattcaaatcccaatcagatcttccctcccscagtagctggtcttctgttctggcttcctgccatcctgtcctccacacagcagccgggaaaggtttttttaaaggggactctccgatttaacacayttgggtggaaaaccctttgcttcggcctctgcaatctccctgccccctctccactttgccctggcctcatttctcaccactaacctcactctgcactctggccaactccccgcctgcttcctgattcagacactaagcacacgcagctcccctgcctggagccattctccctctccttctttcttctccctggmgaactccccctttaagtgatcttttcccaacacactttctaaattgcccccaccccagtgtgatttttctttatctcatagcacttggtctgcttcttatcacagtttgcaaggctgagttcagaaaggtgtgtttgctcattctgaggcaggagaggctaccttgtgctgctgtggtaacaaacagcccccaggtctgaggggtctgcagagacccaggttgacctcatactgcttgtccctccagggcctccagtgaggtttcggctccttggatcactcagggccccaggcagatgggaagattccactctgaacattgccaattgttgtgccagagtaaagcagagctgggaggtgggctcttgaattggcatttaaatacttttgccaggcagggtaaggcagctcacgcctgtaatcataacactttgggaggcctaggtgggtggatcacctgaggtcaggagttcaaaaccagcctggccaacatggtgaaaccctgtctctactaaaagtacaaaaattagccgggcatggtggtgggcgcctgtaatcccagctacttgggaggctgaggcacgagaatcccttgaacctgggaggcagaggctgcaatgagctgagatcttgccactgcactccagcctgggcaacagagccagactccatctcaaaaaaaaaaaaacaacaacaacaaataaataaatgaataaatactttagccagaagtagccatgcagacctccccccaccagtcccacccacaagcggacgtgactaccgcccccattcactgcctgatcctcctgttctcaggggctccaaggccaggcctggtttgaccttctgactttctgacttcctcctaccttcccagtaacctcatgcaactcctttcactcagcctcaatcatccccatgggtgtttaaacttgcccaagacatgcccctttgaaaaagcctgccattctcttgacccacatgcacgtcctgccccctccaaggctgctagttcctttaggggcaaaattgtgaaagagtagtctaaaccttcttcctcttcttacctccacttctttcttaccttattcccatgtggattctaccctcactcaggcctctagaacggttcctctacggcagtggttcccaatcttgactacgtgtttttttaaaaaaagtcctccacctgggcctgccaccaaggatttttctttaattgacctcagatggggttgaggccttgggaactggccagaacttcccgtgctcctaacttgcagccggggttaagaactactcctctgaagcccccagtgcctgcgcttttagcccgacggacaagtttctgcccttccatcctgtgacctccagcagggcctgaccatgtgagttttctgtggctgccgtgacaagttgccacaccctgcatggcttcaaccaacagaaacgtgtgccctggcagttctgggggccagaagtccaacatcaagatatcatcagagccacatgcccactgaaggctctcgggggaatccattccttgcctcttctggttgctggtggctctaggcattccttggcttgtggctgcatcattccagtctctgcctctgaggtcacgttgctgcttcctcttgtgtgtgtttctcttaaaactctctgcttctgtcttataaggatacatgtgattgcatctagggcccaaccagataatccaggataaactcttcctgtcaagacatttaataatcacactttgccatataaggtaatttttttttttttttgaggtggagttttgcactttcacccaggctggagtaaagtgatttaatctcggctcactggaatctctgcccccaggttcaagcaattctcctgcctcagcctcctgagtagctgggattataggtacctgccaccatgcccagctaacttttgtatttttagtagacatggggtttcaccatgttggccaggctggtctcgaactcctgacctcaggtgatccacccgccataagttaatattttttttttgagagggagtattgctctgttgcccaggctggagtgctagtggctcaatctcggctcactgcaacctccgcctcccaggttcaaatgattctcctacctcagtctcctgagtagctgggactacagrtgcatgccaccatgcctggctgatttttgtatttttaatagagaggggatttcaccatgttggccaggctggtgttgaactcctaacctcaagtgatccacccacctcagcctcccaaagtgttgggattacaggcatgaaccaccacgcccgacccatataaggtaatatttacaggttctggggattaggattagcatgtagacagctttgtgggggccaccattcagcccactatgctaaccctgtgaaccgttgctcgcttctccttgacatctgacggcctggccttctgcataccacacaccctcccacctctctggccacagttctgtaggctcagcctcctccgtaaggccattaagtgcttgtgctggtcaaagtttcatcctaggccttttccttacctcccttgatattttctccctaggtgagctccttcaagcccacagcttctgtgcttacccacactcctacctacattcccagcttgggcttctcaggccagctctagactcttgtatcccactgggttcttccacttacctttggatatctcaaaggcatctccagttggctgggcacgatggttcacacctgtaaccccagcactttgggaggccgaggtgggcagatcacttgaggtcaggagttcaagaccagcctggccaatatggtgaaaccccatctctactaaaaatacaaaaattagctgggcatggtggtgggtgcctgtagtcccaactactcgggaggctgaggcaggagaatcgcttgaacccgggaggtggaggtttccgtgagctgagctggagccactgcactccagcctgggcaacagagtgaaactccgtcttaaaaaaacaaaaaacaaaaggtgtctctagtgtaacataactaaaaccaaaccaatcatgcctccctcccccgcatcctccctcctggagggagctccaggacttggtcttctcttccagagttctctgtctcaaactgcgggaattgctccccacccaggcctaacctgaagtgtgagccttggcatctctttctatccacctgtttttcctctatgcacctcacaaccctggtccaagccaccgtcatctttcaaatggctgcagtagcctctaactggccttggaggagccatcctctttctctaaccagctgccaaccctgcaatggcctctgtgtgctttccagataaagcctgactcctcgtggcccgcacagccctgcctgggtggtcctatcctgcagcctctccagtaccatgaaccctcccttctctgaacctctatttaatccatttcatataccccgttttctcctgccatagggccttgcacatgctgttccttctgcctggaattttcttcctgcctccctccgcacccctgccttgtgttrtgggttcctcgctatcctctagcttttcgctcaggctcattgttggccctctagatgtattcacttctcttgtttgttaccctctgtcataggactgtgttcgtacttcccaaggagtcgtcttggtttgtgactgtacattttcccatgtgacatttgcttaatgcctctcccactctggggcctgtacaagccccaggaacaggacttggaccctcctgtttaactctacaatctagcatccagcaggmgcgcaggccttcgttgacttttattttattcttattttttatttttgagatgcagtttcgctcttgtcgcccaggctggagtgcagtggcgtaatctcggctcactgcagcctctgcctcccaggttcaggtgattctcctgtctcagcctcccaagtagctgggattacaggtgtgcgccaccacgcctggctaattttttgcatttttagtagagatggggtttcaccatgttggccaggctggtctcaaactcctggcctcaggtgatccacccacctcggcctcccaaagtggctggattacaggsgtgagcccccatgcccagccttcattgacttttagwtgacaactatttagcatttgctatgtgccaagaactccctgcctactaatgcagttaaccctcaygaagcctagaaggaaggactgccattctccccacttaacagatgaggatgccgaggcacaggaagtgaagtgactttctcagggtcaagcagggagtgagtggaggagccgagattccagctctaaccgcatgatgctctatacagtgtgactccggctctctggctgggccctctccatagccctgtgagggttaaggatagaaaacagaggctcagagagttgaggtcccttgcctgaggtcacacagctggttggccgttccctgggctataagcttcagtattcccaatgctgagcatattttgagaacccgagaaacagacgtttggctgggtgggaactgaactcattttgtcagggaattcaacaactaagttggccctgagactgggtgtgaagaccgctctgtcccctgccagctggatgacctcaggagagatctgatgactctgaggtcctgctgataggacctctggtgtctctgttccctgctggcctcccctgggcctgggttgggtttcctctgcaggaggcagctcatgtatgtgctcctagacgcccttgggccagcagctccttggctgttcctccctgagccagggcagccaactttcttatccagctctccatgctccccaccccagcatgagatgtcagctgagagttttctggatctcccctagctagggggaaagcttccatcatttggaacaggaacagcaggaacagcaaagtccctttccccaccatctcccactgcctgctgtgcttctcctaacagctcatggtaaacaccctgactgagcggcaggggctgtttcctttgggctatccatgtccacctacactgccctttttaatccttacaatttttcttggacacgggggcataatattccattgtttttcagttgaggaaactgaggctcagagaggtcaagtgtcttgtctgaggtcacacagcagaactgggagtcaagccagatgggctgcctccaaggatcctactcttaaactctagagtactagaaagatcttccgttgcctaatattgattcctgataggctatgcttgagtagcatctgcttttgaaaatggagcctgggtcggttgcggtggcacatacctgtaatcccagcactttgggaggctgaggtgggtggacacctgaggtcaggagttcgagactagcctgagcaacatggtgaaaccctgtctctactaaaaatacaaaaattaactgggygtggtggcacctgcctatagtcccagctactccggaggctgaggcacaagaattgcttgaacccaggaggtggaggttgcagtgagaggagatcaygtcactgcactccagcctgggagacagagcgagactccatccgtctcaaaaaaaagaaaacgaaaatggatcctgaattttgaaatatgctgtgactcttccctagtttgggacatctgggtcaatcccttttgttaaagtagtttatttagttggctgagagcgggagctgcctacgtgacctggagcacaagctttggaattgggcttgggttagaattccgcctctgccnctcaccagctgcgattaagaacaaagatactgggttgggctcctgcctctattacttgcaatctgtgtggccttggatgagatatttaacacctccgaacctcagtgtcctcaattgtgaaagagatcgagataacagctgaacccacatcccaggagcggattaaatgagatagtgcagtacagagtttaccgaagtatatggggtcagcagccagccagtaaaatggtggctaatggttatcatgattaatgttaacattaagctctgaaaggtccttcgtgaactcataggtatttgttctctctctccctttctctctctcttccccctgcccccttgcaggtrgaactgcatgtccacctagacggatccatcaagcctgaaaccatcttatactatggcaggtaagtccrtacagaagagccctctctccctgggatttgagtggggtccccagctccacccagaggcccctggggaattccagggtcactgttccttcctgtctccctgtgggaatcaagccagctccaggccagaagtgggactgtgaggacatggaggcctcngcactgagctgsagacccgcagaccaactcctgagctttctgggcctctgagtcttgtcctcctggtgtcaggtgagccaggcctgagcctgctctccccacccacccacatacgtgcatgaaggtagttcccagggctgaatccgtctttttttttttcttttgagatagagtcttgctctgtcgcccaggctggagtgcagtggcatgatctcggctcactgcaacctccacctcctgggttcaagtgattctcctgcctcagcctcctgagtagctgggattacaagcacatgccaccacatccagctaatttttgtatttttagcggagatggggtttcacatgttggccaggctggtctcgaactcctgacctcaagtgatccacccagcttggcctcccacagtgctgggattacaggcatgagccactgtgcctggctcctgtcttttgacttaactgagagcctatatatagcaggtgatgtgctcacatgagatgccagtacaatttcttgagcatctcctagagctgggctgggctttatcagctcattgaattcctccacgcttggaagaggaggatacgctctctgcattttactgaggagggaatgggctcagccaagacagttgtccacggtcacacaaattaatagcagatcaagagttgaacccaaggctgtctgacccctaaggctttactacatcatcagggtcataacctgctaggagtcacggaaaagtggctccccaactctgggcctaaatctctgcatcttccaagtgagaacacacttcctgcctcagctctcagagatgctagggggccagagggtccccctgttccccagcgaggaaggttcttcccttcctacccagacctcaagggctcacagcagctcctctcttaggaccagcttttaagggcagggactttaaaggccagtggatctggattcaaatttggacatattatctcctgtctgcgaacttggtctctatcaactgaggctaagaacaggccctccctagagagatgacctaggagctaggggctccttgtccacccagccctgcccccgcagacctgtgttcctcggatgtttgcacaacactcattttgtttggagctgaaagaactcagcctctctgtcacagtcttgaaattcagctcgggacccaaatttgaacatttctgctccataagccagaatcctgttattcagaggcctgccctcatggagagaatgagggatcccggggggttgcccccaactctcgggagcatctccaccaactccctgagagatttctggtaagtccactattctccatcttttcrcacttccagggaccttcttctgccccaggaagctgccattgatttaattcctatttaactgcaaggcataagcacagtagcacctcctgtgtgccaaacactcctttaagtgcgttacccgggttaagttattgaagcctcacaacaatttgtaagayaggaactctattgccgtcatttacagatgaggagactgagccgtggtaggtggagtaaggtgcccagtaagcacagggcggaggtttgaacccagatagtctgcccccgagtccatggccctggccattaccccctgtcagttagaggttttggtaagtgaygcccgtaaaatgcttagttcagggcctagcacacattaatgtgctccataaatgtcacttaatgataatattcttattaattggagcttatatctctaagtggggtgaaacctcttggcttatctctgcctggcctttgcccatgtcaagccgccaacttgccacaaggcccctaatgaggtcgttcagtggggcaccaagatgagatcgaacccaggcactcattaaggggtcacggagggctcatcagctgcagccaggggctgggagcgccgggtggggctaagagaaaggggaaaggagccgccgggaggggcactggtctgatcgtccattcctcacaccacctctgggccttggagatggcgtgcggcaggtgccagctggagcttggcctgaagtcagcaggcaggggactggggagtttgtcacactcagatatgggtgtctgtaaatgcacacaaatatgggctaagaatggaaggaggaggggagcccctggcctgagccctgctaggcccaattcagtggccctttttccagctctgggactcaggcctgcctcattaactgtcctcacccatttctccttcctccagttcccaggattctggccttttcaggggcctctccaacctctttctcagtcttgtttataaccctgtcaactatttctacagagattctgaaactggctgctctttcctccgatcactgccctggtctgggccaccactgcccctccctggtgctgtggcctcctgattggtctcagccatctactctggccttcctctctacgggccctgcagtgctgtagttggagcaagagccttaacccatggtcttcccagctcattccccagcttccccatctcactcagagtcaaagccaaagtccacacatgggccttaaagttctgcaaagcctgcattgcctctctgacctctctaaggctccttgcttagtccacactggatgtttttcaaacatgccagacctaggaaacagagagtctgggttacttgcccaaggtcacacagcctttaagtcacagagctgggattcaaacccagaccactgggcttcagagtctgctctttctcatgacacacaaagtttcatttcttcctctgtgcacccctacatggaaaatattatgttttactgacaagggcaccaagggccttagaggggagcgctcctgcctgggatgatgtggtaaataggggtgggagatggacttgacctgcaacccctgmgctcatcctccctccctccctgggctcctgatggtgggcttcttgtgactgtgttgcccaccaaggccggaagaggaccagacagtgccccagcacagcagctgtggctgaccagggagtagggatcatctaagaacagagcgtgcatggtggctcacgcctgtaatcccagcactttgggaggccaaggcgggtggatcacctgaggtcaggagttcaagaccagcgtggccaacatggggaaaccccgtgtctactaaacatayaaaaaattagccaggcatggtggtgggcatctataatcccagctacttgagaggctgaggcaggagaatcacttgaaccagggaggtgaaggttgcagtgagtcgaggtcgtgccattgcactccagcctgggcaacaagagcaagactccgtctcaaaaaaacaaaacaaaagaaaaaacagagggtggccctatgaggagccttcgcttgtgtgggtggccagggacagcaagaggtgccagggccctaggaacagctctttcctgcttcaactttgggctccagatgggcrctttccagctcagtctgagcagcttcgggaagctgtgtcccatgggagacactgggagtcccctgtgctctttgtctcctgtcgggcccccacattagctctctggcctcagctctggcttccctccaatttgtttcccacgcagcagccagaggagctttcaaaaaggtaaattatttcatgctagtcccctgcttgaaatcctacagtgccttcccagtgctttcagccaaagccccagtcccttcctaagcccagcctggccctgcctccctggtgcatcatctgcacaaatgcctgctctctgacctccagccaccctgcacttccaatgcccgcggcttcctgcctgcagctttagtacagacccctcccctgcccagaactgcccccaccccaaggcttctgctgaaatgtcacctcctcagagaggccttccctggctgctctgtctaaactctgtgttgagaagttccttcttgatggttgttgaggagggaggctggagaagaagaatcraagaggagaaatagaaagcaaaataatttgttctwggggacgggctggtgctgggcacggggaggcgcccgtctctggtgtgggcagctgggtagatggaggagccgtatttggaaatgtggaacccaggaagggagtgatctagagggaggggaaaggtggcgcgagatgcctgcctctcaacaggtagccagacacatgggtctgtcttggtcactgctatctgcccagtgcccagcacatcacaggccctcagtggtggtgtrtgggcatagagaattagaagctgtggacctctggatccggagctgaaaaccaccaaaggagatgagttggcctggccaggtgtgtaaaaggcagagtctgagagagaacgaccagagggcagagcccccgcaggtggagtyctgggggctggagggagaccattaggagaatcgcacatggctggcgcagcaggtcccaggcaaatgtggccactgggtttggcaatatgggagccagagccctagtgtcatctccctgccttctacccagcagttcccagagtgatatccccaacagtgtttgacaactggtacaggctcttcagcggccacagttactgggcaaggccttgtgagggtgactttggggcagctggccagcagtgggaggggaagcagtctcaggggtacctgaggcactgagctccgacctccaggtgccaatgccgcaccagggcaccgttcccctgcaggctcttacagggattaggggctggtaaggagcagtgattaggggctgactagcaggctggtgggcaccagcatgaccccttggtggtaccctctgggcactcatggggacttgggctaacagatggggaagggagcacattcagggggcttaggaaacatatttatgtagggaagcattttaatattttagtaacagaagctattaaaggacttacaaacttacttacatacactaaaacactatttggtcaaacttctgtttctttggcactttcctcctttattcttttttatttttttgagacagggtcttgctctgtcacccaagctggagtgcagtggtgcaatcttggcccgcagtagccttgacttccaggctcaggtggtcctcccaccttagcctcccaagtagctgggactacaggtgcacgccaccacgcctggtgaatttttgttttgaaggggtttcactgtgttgcccaggctggtttcaaactcctgggcttaagtgatccgccagccttggcttcccaaagtactgtgattacaggtatgagccactgcacccggcctcctatttttctgcttctgctttgtggataattggatgcttggacctcctgatttaatcttctaatttccttaacygtttactcctatttttcatcatcttgtctttttgttctactttgtggaggatttcttcacttttagcttccagttcttttcttacatcgtgacagttgctgccgcattctcttgtaaatttccgagggctcgttcttgggttctgaatgttccctcctttcaaggatcttctcatctctttgaggatattcatgtcttttttgttttggttcttaggttttcatctgttctctgtgctgtttcctcggagtgcttttgtctattctgttgttttgtccctcatgttagaagcatttcttttttttttctttttttttttgtgatacagagtcttgctctgtcaccaggctggagtgcagtagcatgatctcggctcaccacagcctctgactccctggttcaagtgattctcctgcctcagcctcctgagtagctgggattacaggcacacaccaccacacccaactaatttttgtatttttggtagagacggggtttcaccatgttggccaggatagtctcaatctcctgacctcatgatcctcgcaccttggcctgggaggccaaagtgctgggattacaggcgtgagccaccatgcccagcctagaagcatttcttaatgtctggtgttctctggctgttgtatcttaaaaaaaaaaggggggggaaactgaggctcgaggtgaccttgtgagctggagcagagccgggatgggatgaggaggcaggagcgtgtgcagaagagagggagcccccctgagctcgcaccctgcttcccgtggctgggaggggaggccgagatgcttggggagaaatggaggctccaagccagaggggctgtttccagcacgctcttactgagcgctgctgtagtccagcttggtgtggcggctgtgggcagggaggggagagaggtctgagctggctggcggcccactgggcccctcccctgagcctccaccggccctctcccagtgcgctgggctgggcaagcctctgatgtgccagccagatggagggtgaagtcctgatgcctgcccctaccctgggaattgtgatgctgcagttactgcccctgataacccctgactgggcataggaccagctggctgagccagctcctggggctgaggaggaagccatgaacttgacctggcactttccttgtctccaagcatcagtcaaccaaggatatggagggggtgtgtgcatgtgtgcacacatacacacacacacacacacacacttcaacctgtttatcccccttgagatttgctgacttgtgcattgggggtagaaggtgctggaaaaattccggtcctggttctcagtttccccatctgtccagtgggagcagctggactgagagacgcccatgtctcctgctgtggtcctgcaaggaggctggcgctcctgagtctgctccatcctggcctgtcaggcctgcctggatcctgccccgggttggtccaccactcactgttttgtttccaggaggagagggatcgccctcccagctaacacagcagaggggctgctgaacgtcattggcatggacaagccgctcacccttccagacttcctggccaagtttgactactacatgcctgctatcgcgtgagttgcccccaacccacaggtcctagggcagcattgatccctatgactaggaccaggcctgtccctcagcctgtgggggccagagaagttgctctgaaaccacagctgtctttctcaccattgtgtacacttagtgagtctctccagtgcctttaggcctcagttttcccttctgagatgtgggtgtgatggactgaaattgcttcaagttctacagagaaatggcagaatatgggagctaagaacacagggtcagaggcagtgcagggcttgaacccgggccatctatctcctagttcagggcttcgtgttgtgaggggaggagaggcctgaatatagggtgggggcggggagatgtggggaagattctccaaaaggctttttctttttcttgtcttgagtcgccagggaacagcactaggtaccgaaaaggcccagaaggggtatgggcgagtactagagagaaatttccatgactgctttatttatttatttatttatttatttatttatttattgagacagagtctcactctgttgcccaggctgaagtgcagtggtgcgatctcagctcactgcaacctccacctcccagtttaagggattctcctgctttagcctcccaagtagctgggatcacaggcacccaccatcacacccaactaatggttttgtatttttagtagagatggggttttactatgtttgccaggctggtctcgaattcctgacctcaggtgatctgcccgcctcggcctcccaaaatgctgggattacaggcgtgagccactgcgcctggcctccatcctcatcctgaagatgcaagaacttctggtgaccccttctcctgagagtggcctgatctcccctgggcagggcactttcttcccacgctgggctctcccassacttgtgtgccttccctcacacattctagtaaccacttcattttcactyttcatggtgggaacttccagctaagcacagtccaccgttacgtgatcaacacagtggccctggcaggccaatttgtgccttgcttctggaacaaacatgcagtaataacaacgaaaatgttttgagcatttgtccgctctgctccaagcactgacccgggtggggtttatgaagtttgactcatttgtccccgcaataactccttgacctaggtgtcagagggtgactaaccaggggtcacacagcagataagtgtgggcacaaggatccaagtccatgactgtatcccacgtgtctcccacatccaggcatccctctggacttgtccagctgtgtccttttctctcatttctcttccctgccagccttaactccatcaccaacaaatattgggctactctgtcctaggcatggtcctcagctgagaggtcgcagccatcccaagacagaggggtccttgccacatggagactgcattctagtagggaatacagcaaactggctgataagccatatgacacacaatgttgagtagtgataaggacctgggagaaaaagaaagcccaggagaatggtggaggggccgttttaagataaggcggtctgggccaggtacagtggctcacgcctgtatccccagcactttgggaggctgaggtgggcggatcatgaggtcaggagatcgagaccatcctggctaacacagcgaaacgctgtctctactaaaaatacaaaaaattagccgggcgtggtggcatgcgcctgtaatcccagctacttgggaggctgaggcagacgaatcacttgaacccaggaggcagaggctgcagtgagctgagatggcgccactgcactccagcctgggcgacagagcaagattctgtctcaaaaaaaaaaaaaaaagataaggtggtcagggaaggcctstctgaggaggtgaagcttcagctggctctaaaccaggggagcgggagagacgcagtgtaggacagtatcggggaagagcaggcctgtgtcttctccggtggcctcagggaatgagggagaaggaaggtgctggggaggctggcaaggcctggaggatgcaggccttgtgggcaggacctgggagttgcgatgtcactctccgtggcaggaagctactggggcttcgaggggagaagtgatatgctttgatttaccttcttaaaagattgccccaactgctgggtggagaacaggatgacaggggcaagcatggagacagggaggccagttagagatggcgtgattcaggccaggatggaggggtgagaactggtatgcagttccaaagtagagctgataggacttgcccagtgtctgggatcttatccagtggatgcccagagcttgggtctgggggatgaagtgggtttaatctgccaagggttggggatgtcatttgctcctggagctcccaagggacttggggaaggttgttcccaacccctttcttcccttcccaggkkctgccgggaggctatcaaaaggatcgcctatgagtttgtagagatgaaggccaaagagggcgtggtgtrtgtggaggtgydgtacagtcygcacstgcyggccaactccaaagtggagccaatcccctggaacyaggctgagtgagtgatgggcctggaaggggccatgctgagggtgtggctgggaggctcagctctgagactggaagggcgaactgctgggaatccctgacccaagcaagaccttgttcttgcccccagtctggtccatggcctcagaaagatgggtttaactctgtcacaagagacgtggttcccatcctccctttgccgttatgttcttaccttgggcacaagtgtttggctgtgtcttgctctggccacaggcctgctgtccaggaatgttaacctgcttagccacccaggatttctgaggggtctcccttgtcactgatgctgatcagatctctaaaggccctaaaggtcctgctctaacttcataactgaagtgagtctggcccatttctagccccctgcctgggmccccatggatctctaagtggtatcacaaaaccaccctgccccattttctgagccatgattctgatacatatagaatgtgaacatcatggcaggcccaagcttagcaatgctgtccatctgggggtggggagggccatgttgacaccccacacctcccactaagatctaggagcacccagctgctttaagagctagagggacatgytagggcctgggggcatctmtgccagtctttcctctgaggcagtgggtcagtgggggaggagggtcctccccaaagcctcctcttcctcctctgtcccagtcccagagctgccctttaggccttccttttgcctcaggcccatccctactcctctcctcacacagaggggacctcacccmagacgaggtggtrgccctagtgggccagggcctgcaggaggrggagyragacttcggggtcaaggcccggtccatcctgtgctgcatgyrccaccagcccagtgagtaggatcaccgccctgcccagggccgcccgtctcaccctggccctgacctcctggcctagcagtggggctgtacctgatctcccctgtgccccacagccccatggtgtccccttgagcccactggcatgaacttggggcttcatgaaacaactggagacctcctaggcaggctcagaacttctggagatgttctccccagggacaccatgcctttatagccaccctgcaggaagctcaacaccaaataggaacgtaactattgaaaaaaaaatctaggctagattctgatcagcccatagtcctccctcgagacccagtggaccaggccccatcctgtctgggcctgaataggtctgatttccaagatttctgaggggtctcccttgtcactgacgcagatcagatctctagagtttgtgcctcatggtgcacagcctcactgtgtgatattgggcaggtcacactgctgctctggttatgcaccaagacacctcagttgtgcactgtcacaaggagatgatcacacttacttcattcctctaccctcaggattagtaagaaccaaagagctacctgcaygcatttcctctaatcctcgcagcagcctgcaaagcagaactaccattgcttagtcccatttgacagatgaggaaactgaggtggagtgaggtgcagcctcttgcaaggcacaaaccctggatttgtatccrgggacatctagttccaaagcctgtgttcattcattctttcttaaacacttcagaataactttattggttaagagtacctaatacattagcgagatacttcccaatactagtgtgagttctattttagatgacgtgttaaacggtcctccgtttcctcatctgcgcatgggaataagcctaccatgagtgttgttggaaacaccaggtgagagaagggtccgtgtcatttactgagctcaggccccgtccttggtgctttacacacatggcctcggcaaagcctggccgtgaccctgtgcaatagctggcagggttctttctgaaaagggcggaaactgaggccataagcagagcagttttccrcaggccatgtggttaggacatagcagttaggatttgaagacactgagccctgttttgtgctggcctcccatggggggtttgggtgggacagcaggcaggtaggctgggaggtctctccatggtgctggtgacagagcctgggtgggcatctcgcccacagactggtcccccaaggtggtggagctgtgtaagaagtaccagcagcagaccrtggtrgmcattgacctggctggagatgagaccatcccaggaagcagcctcttgcctggacatgtccmggcctaccaggtgggtcctgtgagaaggaatggagaggctggccctgggtgagcttgtctcccacccatagttgggagaaatcacaagaaccagggaccatggtgtctcctgagttctgaagtgtgtctttgttgggtcttaaggcttggaactggaatccccctgggccaggcgtggtggttcatgcctgtgatcccagcactttgggaggcgaggcaggaggattgcttgagcctaggagtttgagaccagccagggcaacatagtgagatccatctctgcaaatacaaaaaaaagtagtcaggcatggtggtgcatgcctgtagtcccagctacttgggaggctgaggtgggagaattgcttgagtccaggaagtcaaagctgcagtgagctgtgataatgcgactgcactccagcctgggtgacagagggagaccctgtctcaaaaaaaaaaaaaaggaagaaagaagaaagagaaaagaaagagaaagaaagagaggaaggaaggaaaaagaggargggagggagggaggaaggaaggaaagaaggaaggaagggagagagaaagaaaagcctccacttggtgttgggagtcctgtgctgagcctgcttctggctgtgatttgctgtgtgaacctgggcaacactgtgtcttctctgggcctctgtttcttctattgggatgactgagttggagccgacatctcaaaagtcgcttccagcgtgatgatgaatgggcctcctgtggagggtgcagcatggtggagaagtcagggctctggagtcccactgcccgggctcagagcttggttccacacttcctgtctgaccttggtcacattacttgaatctcctgagcttcagtccttcatcataaaatgggtgggataatagttgtgaatattagataatgtatacaagtcacttcatatactacctgacacatggtaactggctaatgagtgacagctaccacttagataaggacttggagggtaaaagaccaggtttccccatgctgttgaagcaggcagcatgactaggatggttcaatctccacagcatggtcaaggcagggcctgcnggggccctcccgctagggcacccatgacctggctctcccccttccaggaggctgtgaagagcggcattcaccgtactgtccacgccggggaggtgggctcggccgaagtagtaaaagaggtgagggcctgggctggccatggggtccctcctcactgcctcctcccatacttggctctattctgcttctctacaggctgtggacatactcaagayagagcggctgggacacggctaccacaccctggaagaccaggccctttataacaggctgcsgyaggaaaacatgcacttcgaggtaagcgggccagggagtggggaggaaccatccccrgctgtcccaacttcctgtatagagaggcagaaagcagggcgggtcccaggaactcgaggggtggccccaggcccagacatggggggaggaatcagcatggcctggggccatccctgccagccacacacctgctcttccagatctgcccctggtccagctacctcactggtgcctggaagccggacacggagcatgcagtcattcggtgagctctgttcccctgggcctgttcaattttgttccaggaaggccaaagagggaagaaactttagggattgggcatcagcccatgccgcgtcttttagatatgaaatctcttcgacaccctgggaagcaggcattgccgtcctcatcttacaaatgaggaatccgaggcccagatgtgctgtggcttgactgggattacccagctgctaaccagcagagctggggccctacagctcatcagctggagcagaacgctccattactctgagggaagcttccacacttccaattctcccaactctgccccctgggcatcgcataggaagcaggagtccctctggccagcatgttctctcttcctgacacctggcccttgggacccctgggcattcccctgagcgccatcttgaagctttccaccggagggtctgttccaccctgcctggctcccatcctggagtctaaccagggtcaaggccctccttccgtcctgtcgccaagccayaggagcagtatcaggccttaggaaaaagccgccttccccaagacaaggacagcaagaactcagggtgaccatggtcaggccagcacttatccatctgccaggcatatgagaaggggaggggcttcggctcygatgttctgatgacaagggggtcttggggcttgccttagggacacgtggcacctgtggaggttcttggaggcatgtgggtataccatgggctggaaaaagatccaggagtcatctgcacagatatggtggctgaaggagaagcagtggccccaggaggtggtggagcaagaagggcctaggatagaacccagaaggacaatggtatttaagggaccagcaaaagagacaagtaggaggaaagtcaaaagtgtggtgtcacagaaatccagggaaaaggtttcaagaaacagtcaacagtgtgaaattctgctatgcaagtcgattatggtcagagctaggaaagatccattagatacaacaagatggtggtcagggatcgtgccaagaacagcttccatggtatgttggagtagccagctcccagtgggactgaggaacaagcagggtagggtgcagaggggaaggctggagagggtggcagccggagggggatgttgctttcttggctcccacccccacgcccccaccggctgccattctgcctggttcccatgtctggcccctctgctgcctttgcccagctctggtcttcaggatgggctggattctggactttctggttacatagacttgaacaagtcacctaagttctgaatttatttccccctctgcacaaggatcagatctttcagatctgtttgaggctgctgtgaggatcaaaggcgggtgaacgtcaatgtgttctgactatttatgtaagagtaaaaggaggctgattctctcctcctccctcttctgcaggctcaaaaatgaccaggctaactactcgctcaacacagatgaccmgctcatcttcaagtccaccckggacactgattaccagatgaccaaacgggacatgggctttactgaagaggagtttaaaaggctggtgagtgggtgtgagccatactggccttgactcgggtttgggagtatggtatctacaggtccagtccrgggcctggaatctttggagagagggagtgagtctgcctcaacagtccaagacaagcccaacctagacactttccacagagaagacatctttgtgttgacgtcctgacctaggaccaggtttttgatcctttgcttgggttgagtgcctttaaagaatccagtgaaagctgtcaaccctctccccagaaaggtgtgtgcagcagctatgaagtcttgcacactctcttcaggttgttcttaaatcccaggctgaataagtccattcctgcacgtgtctgcgaggtgtctctggccccctacatgccaccctgtctctcaaaggtttctccaacttccttctcacagccctttttcatgtaatgacaaattaagaacacgacctcatggtctctactctggcacttgctgccgtgtgacagtggacaaatccttccccctctaagcgtatctgcccatgttgagtgaagaggatggactatcactacattgctaagagctgccttctttgttctctggttccatgttgtctgccattctggcctttccagaacatcaatgyggccaaatctagtttcctcccagaagatgaaaagagggagcttctcgacctgctctataaagcctatgggatgccaccttcagcctctgcaggtaggttcctgtctgggcttctgggcagttgccctgtcctggccccagtgtggctttctgtgggacttctagcaagatgcccttccrttcttgggcagcgccatgaatgtgtgatgactccctggtttctgggccctggctgggagcagcgtctcattagatcggtttgttttctataaaagttcttgagaggctgttctaaggggagactttctgaagcccagtcccaaaggtctgggcagttggggacacctccatggctgcccaaagccaagggcagggagaggggcccaggcctgttctgctcctttcttcctatgtggtcttggcaaggcatcttcttgccatcataggaaggagttcctttctggttctggtgttctatgatttttacaacatcctgggtactacaagttgcctgatctttttgcttctctgaaccaacgagcagggcagaacctctgaagacgccactcctccaagccttcrccctgtggagtcaccccaactctgtggggctgagcaacatttttacatttattccttccaagaagaccatgatctcaatagtcagttactgatgctcctgaaccctatgtgtccatttctgcacacacgtatacctcggcatggccgcstcacttctctgattatgtgccctggccagggaccagcgcccttgcacatgggcatggttgaatctgaaaccctccttctgtggcaacttgtactgaaaatctggtgctcaataaagaagcccatggctggtggcatgcagcaggtggcatgtaatttggtggtcttgggcgggccgatgtgggcaggatgagcatggagggagctgggtcagcctgctcagcagcagggcctgagcctaagggtggctgtgaatgccaggccagagatcccaatgctgtgggccaagaggggtccagaggctgtcctccttccagaagaaataaggcttctctggttgttgctcaaacattccctgaactctcagcccctcctaactctaggttttaaggagtaaagcttccttttgggttcctgaagctggcagttggggtgagagcagatgagatggaagagggctcatcagacactggccttggagggtgctggcctctgcagaacgccagcatcttctcagaatcgtatgttctagaagcctgggssaagtccggctaattgtggacttggggaaaataaggcccaacccctgtttttgcaaggttaaggagaaataatcttaaaccagtcwcacaaatcatcggcatttatttcctgggtcctaggtgtcacttatcctggkggacagggcaraggtggtcaratcgttttgagccaaaatcccttccctaaaaatggatctgtggagctccatgagggaacctcagagatgcacaatgacagtttagctaaaatggcttaaaaaatgtgaattgattgtcagctctctccatatctgctgaaaaaaggtttaaaatttttaaaaagtttaaaagtgttttctaaaaaagggacaagcaggtctggacccagaagattgggctggagaggaggtgttggtgttgggacagggtccctgcccgggccgctcgcgagaggagcgttcctgtgtgggctgctcactgtagggcaggccccgcccaagtcccggcgccagctcaataaataacatcttgtggttacagtgtcttgaaagtgtacctgggcacggtgcgaaggtggtgggaatgtgaagcctgtgggtgtgggcagagggctttcccggagtggaggccacagaggcctctggggagccttctcagtctggcctggtttatctgggacatggagctcagagaagaggctgctgggccagtgccagggttccccctctgggaggggacagaaggtctctcgtccagccttcttggacaaggtcagattcaagacgaggtggtcccatcgctgctctggggctggttgccagcttccttgtctggggcgcttccctccacctgtccttctggagaggagagaaagaggtttttcttgggcacatatacacaaagtaatgcacagaaggaggtgtgaaagggcccagccaaactgatagcagtggatatgccctggggagcaagacgagctggagctggactgaggtggtggtggcctatggactttagcctggtctgtaacatctttttacatggaaatacacatagtgtttgttagtataattaagagtcaattaagggccattatggatgggtgcttaaagcatcaagtgaagggctcttgaaggttgctttgtttgtgcaggttccccagagggagaggccagatgttaagtccccagtgtgtcacaggtgctcagcaaatggcagctgttctgtttgtttgttttttttttaatttttgtatttttagtagagacggggtttcaccatgttggccagactggtctcaaactcctgacctcaggtgatctgcctgcctcagcctcccaaagtgctgggattataggtgtgagccaccgtgcccggccaatgttcttctaagagagtaaagagcactgaaccaggccagctcagggagcgccagggtgtggcctgcatcagagtctgtgggggccaaccgtgcatcatggggtgtgtgttgtacctccttctcaaatccatcctgtcagacatcttggtggggtgaggggcagcagcaggctcacagagatggagcacctcactgaggggagtcaggatacaagccaagtctcctcactttcagcttcccttgagcccccctgtgcaaggtgggacaggcagctcctgccacccactggaccagcagtgcaggttgaggggagtgccaaactcacacccaggccccagtctccatgctttcctcctcaggctgcatgataaacaggtgtcttttcataaggtgcaccacgtggggcctggcatgtgggcagagctcaataggtggtacattcttaaaccccagtgacactgtgcaatgttactaggtgccctacaagctcactgagggcctgagttcaaatccagcccaaccagaccacacctttttatccttcaggctaagcccttcacagaaccaggagaatcaccaccctatagcaagctccagggtctgcagatggatgggcactttctcgtgcaatgcacacagtaacatggaggtgtaactagggtcatgatatgcatgagaaaaccgaggcccagcgaggtgagctgatttgcctggatcaagggtggagagccctgcctgccaccaaggctagtaccccttctaccaaatttaacctcctccaataagcagcattcctgaaggtttatagaggcctgacatcagcactgcctcactgtgcccctgcggcaagctaggaagtgggtggtagctcgggaccctattccgagcccgctgcctggaaagcctgcttttattcccagcggggtggcgcctggaactctgtactccccctgccttggggagtcgctggagtgggcgtggcccgcagccccgcctgtgaaacggaactgctccctgcgggcttcctggaaggctccttggccagtcactcttgcctggacgccaccgtgagtgtttcctttccttcagtgagcactgttctttcctcaggccccctttttaaatgtcagtcaccctggcaggtgaatgtcatgtagccagaggacccatactttagggaatctgagtcagggaaaacaggtgttaggagagcctgggcacatgggccagcagctacaactgctgagggagagagagacagaacagagctcaccagagctgagggtgaggacacagaagccttgagagagagcccagggcagcgtgcccagtgtggcagctggacatgctggtcattcagtcggtcaatgaacagccattgactcggtacctccatcatgtgccaaacaccaccaggcaccgagggcacaagacacagagcctgtgctggagaagctcagtctagagcagggccattatgctcagtgggctcatggaggcagcagggagaagaggtgcctccccggtctgggaggggtactgcggtcagggaaggcttctcagctgagcagatgcctgggtctctaagaatgaagagaacccagccaggcaaggggagggaggggagaagcaaacagaggtgcagcgtgtgaaggcccacaggggcttctgagcgatcaaagtacttgactatggctggcgagaggatgagagttgatgctggagaggcgagcagggtgagcctgtggaggttctgcctgggccacgtgacagaggagaatgaatagattatgggacagggaaggcttttggggtggggttccgtcgacagggtgctgggggctctctctcaagccggccagattctatgttaactccctgggtggcccagagcaagtcctccaacttctctgggcctcagtttgtccatctgtaacatgagagggctgggtccaagccccggcaaagtcttctctgttctgtacttttgattcacttctggccagtgaggggcaagaagactagggctacccagggaggggcagggctgtggccctccggacagcccacggggagacagttgcagcctgatggctgtgctgtgagaagcacacacggcctctgtggcgctgtgagagcaggagggaaaggcctcagccgtgcaggggtcagggaagcttcccaaggaaattcccaggctgactgtggacttgagccaaggggttctctgggggaatggagggggtgggggtgttccagccaggacttgggtgggtggatgctgtttccttttgtcattcggtctgtggttaccaagcacctgctgtgtgccaaacagaatgcaaggcctctgccctcccggcgctcacatttagacccctgagaccttgtcagagagtgatgagggtcatgtgattggggaaggctgatctagcactcagagaaggccccttggagaggcttgactgagaaacagaccaaaggtagatgtagctggagggtgtcagggagaggagtggcaccgggtgagacttgggcagggcccggcctacagcaggactgccccagggcaatgtgacaagcttagcttcactcagtgaagccactgggggattttttttttttggcagaagcatgatggacagaatggtttaaatggggtctgctggctgctgcatagagctgaacaggaagggcggagatgggtgtagggagcccagggaagccggccgctaaagtcagccaggtgagagctgtgagtggccagagccaggtatagctgtggggatagcgagaagtggagggacctgggctagggggcagggggacaggaagagtcccggatgcctgtccagaggagtccttggggcctgagactcaaacatcttccaacctagagattgctggactctgccactgaccatggggcaggcctgacttaaatgtggtttcttctctaagaaagtatgggcagtctaggacttggaggctagcccggggcccggcagagggcctctggcatgcagtagtgccaaggacctgctggctctaacctgccccctcgagtgccagctcgcccatgtctccagccagcttcctcacgctcacagcctctgagtctccctggatgtcagggaccgcattccgacggcctgtccggtcacaggagatgaagtccgagtaggaggactcgacctccatcatgcctgtcgcatcgctcctcaggcctgtggggacagaaggcaagggggcagaggtaagtccagatgcattctgcagagaggacagctccagttccccagcacagtggcttctgtcaaaatgacagttattgcctcttattgaaaacaaagcaaaaagcacagaaaagtacaaagaacaaaacaagtcactcataattccacacccagacaaccaccatcaacattttaaagaacatgggctcagacttttctttaaataaaattattgacaaacatgtacacacatttattaataccatgcgccaggcactggcacagataccaccatgaacaaactggccatggtccctggcctcacagagcttaccatctactacaggtggcataaagtcacctcgtacctaagtcatggccttggtgctcaaggcttcaagggagaatgcagggtgctggagtgatcactgggacctgatcaaggctgggggtcacaaagtgacattttagctgagaaccaaggaggacgaggcgtcatgcagatgaagagtgaggggaagagcactacagagaggggaacagcatgtgtgaaggctctgagggagggaggcatgagggcttggaaggacagaaagagccagcaggcgggagcatggcagaagagggacaatgacaccaaggacactgctgaggtaggcaggagccagaccacatctggaacttggttcctgaggggctttaggcaaggccatgaagtagcagccgtgcattttcaaaggtgactgtggcggccgggcacagcagtgctgggaaggggcaagttaggaggctcctgtgaagttcaggtgccaagatggtgggtggaggaggggggcagtgggaaggattctagatataacttggaaatcgaaccaacaagaagtagtgttggattgacaggtaatttaggtttctggtgtgaataagtaggtggacagaagtgtggtttgctgacatatggaagaacaaaggaggaatatttgagggcataaagtcctgtttggcct

SEQ ID NO: 95738 - DNA, 890091 bp, Homo sapiens
  misc_feature (1)...(890091): n = A,T,C or G
tgcactccagcctgggtgactgagcgagaccctgtctcaaaaaaaaaaaaaaaaaagaaaagaaataaggaaactgatattcacagaaactatgtaaactagcaaagttttgctgttctttttactgagagtgtggtgctattccagcttcccatagataaaggtcacatacctcaacaatggttaacagaaagtagcccagacccaagtacatagattcctttagtgtaatattcatattaaatggaaacttttaacgatatgcaaaagaaggaataccttcaagtctagggaaaaaatacatcttcaagtgaaacaatgttctcaatgtattacttcaatttatttatgattcttggtcccagcttagtagactacagaaaggcaaagaacacccttctaaaagctgaaattttcaaagcactaatttaattcctgtgaagagtaatgtgttttgagcctgcccttcttcactacttatttatttagctgaattgcagatcagcttaaaaagtccattaatggtgaaataacctctttcagaagggcaattgtaaaaaatgtgtcagaacttttataaataataaaatgcctagcaagaagatttgccttggagatttctgaaattcaggctgatagcagcaacatgcatctgctggtgggatccaacaggtcagctccctcgcagctttctatggttttcttaagaatgactcaaagggcaataggcaggccctaaggcaagggcaataggcaggccctaaggcaagcggaataagggagctgagggaagtggaacactgcttttttggatggaatgagggtcacccagaggggccttccctatctgattgtgctgtctcctccctccccatcctgggaaatgaacaaagagtcacacagagcatcattgtcagggaagagaacagagcctgcacctaagagcagagaagctgtgaattcgacttggttcttcctaaagtaggtcttgggcaggaactcttattgtcccaggctagtgttcaaggtgtaaagcactggtttctgtttaaagacaaaatatcatgttttaagacaaaatatcatgtatcataagtataagaactatatttaagggccacctgtcagaagtatcgttttgtgaaaccatgggtggcctgcaagagtggatttcatgggagcagctctccctgtaggcaaaatactttttttacatcacagcttgaacaacatggctattctttttaagattcttggaatgctgaatgtcatgcagtcctgcaaaaacagaagcaaaacctggggagacctgatgaaatacctatgggagtatttgtctgacagattcaggcatttggcattttcccaggaaagtcagtcctccaactgctgcttggtcaggtttccaacctaatactatccctgaattctaacttatgcaagtataaaaaatcttcaagaaggtgttcagaaaaaaaattcacagccatttaaagttaaccaaaacccaaatgcctgcattatttgcctttctcagtgtgttggtaatagaagcaggatgtttaataaaatagagacaatgcttcttgtggtgaaaacgcctcattgatgttctctgcttcacaggaccacaccaagtgccctttactagtacatcttttgttggcttcagcttcagccaaaattttgaacaactttgagagaaaattagtgctaggaagcattttgggtgtctattactctgagacaaaacaggaaccattcttgttaggaaagaaatgcctgcaagttctaatagtgaaagagaaagctacttggctcatcccctctccctcccccagctctgtctcagatttttggaaatgtctgaacatcgtttatctagatagcagctgacacaggccaatgattcactttgggttggcaaagtgatttcttggggataatagtctctttagcctgtgattgtagaatttttacccactctttccgtaataccaaaaaaatcaacttagaaacaaacatatatgaaagttgtctgtaataaacttgtaaggcagtttcttttatttttcattttaggtggataaacttgacgctacagtgatataacttccagctaattgccatcgtcctcctgaattgtcatagctttggatttcctgttttggggttggacagtgattagtgtgagaggaagattaaatttctgggctgtttttccacattttctgaaattctttgaccttatgatcccatgaagggctttccatcaaaggaagactcctggcctctctcatctccaccccatttcctccttcctataaagagttgtcacatcctcctggagatggggcaggtctttctgggcacctcctcaaggtctgcctgctcagagaggggtctgactccacccaagcttccagcagcctgggtgggagaggcagatgggatgggaggaatctgtggttggcaagtagtagagtgaacttaattctgaagagttatttagagctaagaagcttattgtgtccacacatctaagctttgtcctccaatccagcatttatttgtgataatgctgatttttaaaaatctccttctctcatagttaaattcttaaagacagaaagtaggatggtggttgccagggagtaggggcagggagatataggaagttattatcaaatgagtatatagtttcagatgtgcagtatgaaaagagctctggagatgaatggtggtgatggttgcacaacaaaataaatgtacttaacagcactgagctatatatatatatatatttttgagatggggtcttgctctgtcgcccaggctggagtgcagtggcaggatctcagctcactgcaagctctacctcccgggttcacgccattctcctgcctcagcctcccgagtagctgggactacaggcacccaccaccacacccggctaattttttgtatttttagtagagatggggtttcatcgtgttagccaggatgatctcgatctcctgacctcgtggtccgtccacctcggcctcccaaagtgctgggattacaggcatgagccaccgcgcctggcctgaactatatagttaagaatggtggccgggtgcagtgcctcactcttgtaatcccagcactttgggagtccaaggcgggtggatcacttgaggccaggagttcgagaccagcctggccaacatggtgaaaccctgtctctaataaaaatagaaaaagttagctgggtgtggtggtgcatgccagtaattccagctacttgggaggctgaggcaggagaatcatttgaaccctagaggcaaaggttgcagtgagtggagatcatgccaccacactccagcctgaatgacaggctctgtctcaaaaaaagaaagaatggttaagatggtggtgaattttatggtacatatattttaccacaattaaaaaaatggagaaaaagcttctcagtttaattcttttcctgtattccccaatgttgggcagtttctgtttgattatatattcaactacttgtttccatgatttaaaagagccaaaatctgggaatgttataaaggaggattcatcccatgctctcttgttccatgagggggcttcccctcagaataatttttccagccactctccaccttctcactaactcctccccttgagaggaagaaacgtggctgcctgctaggggggctcttgcttgctctctcaacaccacagatgaggtctggggctgtccatgtctgccaggaggggatgggtgagtttaattctggagtaaattattaggaagtcaattagattttacagtaagctgtgttcttcaatccagttttttttttttttttagatggaatttcactctgtcgcctgggctggagtgcagtggcacgatcttggctcactgcaacctctgcgtcccagattcaaacaattctcctgcctcagcctcctgagtagctgggattacaggtgcctgctaccacacgtggctaagtttttgtatttttagtagagatggggtttcaccacattggccaggctcgtcttgaactcctgacctcaaatgatccacccgcctcggcctaccaaagtgctgggattacaggtgtgagccaccgcgcacccagcccaatccaacttttactcattcgttcatccaccaaatatttattaagtacctattatgttccaggcactgttctaagcacttgggacagagtaataaagctttttcttttcatctccatttgcccagtgtctgggttttaattcttcattggggaagacaaaaactaggaaaggaaagaaaaaagtattatgccttgaccccctcaagtctctacagttcatatatttttattctaattagctcaatatggaatacatatcaaattatcagtatatcccaaatgggattcaacgctaccccatcaccttccttttaaattctagaagatgccagaaagatgaaaatttagaaaggaaggctaaggaatagcaacaacaaaaatgtataagctaaaatcaggacaatccgatattgccatgcttaggggttagcactaacagaaatcaacataaaatgggtaagattagccatctgcagaaatcatcccaggaaataagccacccaagagatgattcacaagcatattgctagcaatttgagggtgctttctaagtctcaccaaggggtctagtatgcttccttaaaagggaagtcgtcaatttaaaatgtaactagtggaagattagcagtaatttaagaaattgcaaactgtcataaggaaatgacagaggtttgggatgacagataaagaatatagaaaatgaatggtacagtagaatttgtcagtgtgtactcacactctctagcagaggaaatgctctgattctaaagacttttacgtatcttagaaatattcttaggaccaagaacggcaaattcatcttattctatagttggacagcccctaattacagccaatcatctgtctgctcttattctatattcactgatgaaccacctcatttaaccgttggccaagcaccagctcccatctgggtggcccagtggtcaccactaatagtcatcctgttagttacaatccccagggtacactaatgaatggatatgctcatttccaaaccattcttagtgagctggatcaggggaattgctcctccagagcctgcttttcttaaatccctaataaaattaatgtgcattccatagtgttgtattgctcagcatgctgctgtcacccaggttcagtagtgcacctagtttgtcactctctcattcttgttttatccctcaatgtcattcatttcccattcgctcaggctcaaaatcttgaaaacgttcttcaaattctctatctctatcttacttttaatattccattcaagtccaatggatttttccttcttatttttttgtctccctagtctaggccctgaggacatcattattatgtggcaaaaaagtatttcaaaatacccacgcctgctcctatgctcacctaaatcattcatttttttcctaagacccttcccccaattagagagggaggccagagacacccatggtccccacagaagccacgaaaggcagcaaaggcaaccgatgcctgatccttaaattcaaaagtctctggtcttggggtaatactgaaagatttggatccacaggaaagactctcttagctagactagaaaaagaagaatctctaagctggaaaagaggaaaatgaggggagggtttggcaaggaaaaagagagagagttaaatgtatgtgtggggagcatgtgccctgccttctgcttcctcaggatgagccctgagaggggacagaatagatccccttagttaactttagagacccatggaaagaaagttcttctgatacagtgggactggaagacagcagacagtgaaatgtgcagagaaacctgcaccggccgccctgcagtcatggagaagcagctgcgggaaaaaatggcagtgtggctcccacttgcgtgtctgctggagacaatttgcctagtgcccatgggctggagtggtgttgacggagtggaaaagttcccgtggccctccgagagggaacccaggttatttaagacaaggacctacaaagtgtctcccagccatcgtgagggaacctctcctaaggaggagtctgtgtaggccgcctttgctcccatgacctccagcctgggtctgaggggcctctcatgtgtcctacacaaaggacaaacaagatggggactctggaaacagcctccaccatagcgttagggctgaaacaaatgtctctcactcctaccttcctaccctgtccacaccctcttgaattgatggagttcaaaaccctgagaaaatgcagaattggactcattttacctggaagtgactagactaaattttctgcagcaattcgaatggaaacagtgctggagaaatgaattataggacagttatgggttttatttatgctattgttgcatacttgagtagggcctttaaaatttgtacctgctatcctcatattaccaaaatatctttttaataagctccctgcatccattttacatattgctgccaaattaatttccctaaatgcccactttaacaatgcattccgatggccccctgttgttttcaggatgaagtccaaactcttcatccctgaggcattgggaaaggtcctacaccatctgctcctcaactcctttttaacattttaccttctgccattttcaataggaaccctctttttccataaagccagcctctgacttccagcctctctgcctttgttcatcatctctaatcgtcttcaccatgtctaaaatgttctctctgcttctttcttttatataaatctaaacttacctcagtcattcaacaactggttttctcaaagtccatccttgcrgtttcctgaacacacctatccagtttcatgtttctgtgtcataagaaaagtagcaatgaatggctacgggaaatgagagaaagaacagattacctaaggatgggcagccagggaagccttcctagaaagtgtgtgcatgtgctgggccatagaagtggaaaagatttaaacatacagagacagaaaagatgagagaagaggygtttacagggaagaaatacagttatcagcaagaaaaccacccatgtgtttggggattattgaatggttgrattaaggacaaactgagttccccattttattaactcctgaaatakttattacctataccactaactcttatttgtagttgatatttatatccataccatatcatctcaccatatatacgattttacataaattatctaacaacctgagtagtaaaacagttcanggaaaatgaactgtagaaaaatgttacatggatgtgggtggtgtgtcttaaagatcacagataatttctaactgagtrgcattacctttattaataataacacatgaaaagttaaggaaacttcagttctggatctgagcactgacttctctgtgaagctaagtgccatttatctctcaattagagcttttaggagaagaaatatctaagatgacagatggcaagatttaacaataataattagaaaatctggatatagtaaatgcaactggagagaaggcrgtagacatggaagagagaacaagatgatccaacataaggataacaggcattcctgatacagagaactaaaaacaagacaaaaaggtggtcaaacatatgatttttaaaaatacaggactgtctcctccatgtttcagttgtctctgatccttaatgtcaccgctaaaggactagttcttcttggcaggacgttgcggctctaacactgcaagttggaaaactgaatttattttgccatagaaaatacgtgtttaaatatagttaaattcctttattatcagttcaagtaaattttgagttaaatgggcttttgtgggctggtttatttacagagtcaatgtttttagtatggcctgtatgtgaaaacatgttctaagtgagaaacttctaacttggaaataaaccttctggaacataaaccagtttttaatttgggacatatctgcatttcttttgtaatagcttcagaacctagcagaaaactacactcagagcaggagtttagtaaatatctattgggaaaaaatttaatgtatgcaggtgattatttctgaattcaccggttaagaacagtaatagttygtgtgccggatgtgaagtgttcacattcttcaaatgataatcatgggaaatcaaagcacaaaacagtcactgaacactataataaatattctcacagcaggagagatggtggctacctcatgttatygtctccttcagaagctgtagatggaacaaaactgacatgaatcagcaaagtgaaacaatatattctaaggaccttcaggattaactgtacttatgattccactgggtcttttgggaaggaatataataatttccactctgaaatcacctttaattcatttgttcatgcatttacttaatttataatttatcatttatttattcagtaaatgtaagaatttcctaccactgtggcaactgatactacaaatttagaagcctaaacaacacaaatgtattgactcagttatataggtcagaagtacaggtggaaatcaaggtatcagctggctggtctcttatctggaggctctggaaagaatccacttggaagccattcaagctgttggcaaaatccagttccttacggttgkaggactgaaatcctcatatcctttctggctgccagctgggggcttccctgagttcctaggtgtctctctggtccttgcatgtgggcgtctacatacaagagccaacaacagggcattaaccattctcactctcagacctctctgatctcccctcatctggataattcagaatagggcccaccctcttttaaggtctctagccttaattttatccacaaaatgtcttttgccatttaatatagcatcctcacaggatccagaaawctgagtgtgaacttctttggggggccattctgcacaccacagtcaacaattattgttattacagacttaaaaaaattctgtactcaatgaatagcagaaaaaaaaagcgggycattaacctgttgaagctctgccaagaagtgatctcttagtcacatgtttcatgaataatcttattttttagctttaaaagaatcatttcaacccttagctatatgagcggttctccagtgattacaaattatcaaaacatattttttattttggagtcatgaacagcatatggacattgtgtgcaaatatatagcaagctatgccctgtgtaactaatttgttgccaaatctatggtgtggggatgtaagaattcttatccactgttgctgagaagtaatttgttacatttctggagggtgatttggcaaartatagaaaagactaaaaacatgcatattctttgacacataaattgcccttctaggaatttctgttaataatggatatggataaacctttcattacaaagatattcaagaccacataatatatgwtcataaaggattaatgtaatctaaatatacaagagaatggttaaataaattatacttctttcatacaataaaatgattatgataatactcctagagtggtttagagatctgacatcataagggacctgtgtccccaagtcagaaccaaagctggaagaacggaaaggtctcagattttctccatgcccaataaatgcagaagcagaagagacatctggatggggaatccaggccacattcctgatggtccagcagcagtagagagcacgatttccccatccccgagaatagcacagttgtggtgaaagaatgtagactctaagagttttccataactccagagcaacacgatcagcctgtccaaggttcctgagagataatcagacctggagagaccatgtggtcaggattcctgcatagatcagaagctgagaagcaggcaggtaggaatgtaaatccatgcaagctccttggaagttttagatgcawgcctaggcctggggggaaaccatgaattggctgagatttgtttttgctacccgtagactaagagttagaataaaaattaagctgaatgctggaaaataaaattatatctgatatttctacatacaacatataagtagggagagaagtagatactttataataataataatggctatctctctagatgttattatgagtgatcttaattttattatctgagatttcctatattttcacacgttaaaataatgaagtaggtatgagtctcaaatgtaggaggaatattgtaattctttattttctgttactcagcctaayatagcctctaagcaccagccctgtccagcaggtaattctacctaaattactgtgtcaaggtgtgtaagtgtgtgtggataagaggaggatccctcttgtcagtaattatctgttcatactggttcccactgggtcatctattgtcagccaccccatggttcctttggcatacagttcttcattagtatttccttaaaatccttttttatttctataagaagagtagtgatgccccctatttcactactggttttagcactttgagtcttctctctctgtcgctccctgtttctctctgtctctgtctctctctctgtctctctctctctgtctctctctctctttctctcagtctgccttttaaaaatcctggtcagtctagctaaagatttgccaattttgttgatcttttcaaagagccagcttttggttttgttgatgtctctattgtttttctattccctatttcattcatttgtgctttaatctttattattttcttctacttgcattgggtttagttttctcttttcctgttttcttaaggtgaatgttaaagttattgactagagatctttcttttgttttaaatatacgtgtttatagctataaatttccctttatgcattgcactgtcttaactgcatgccataagttttggatgttgtggtttaattttcattcaaataatttttgaattgaatgaaaaatttaatttcttccatgtgaaaattaatttcccagtgatttcttctttgaccattgattatttaaaaatgtattattaggccagtggtggtggctcacacctgtaattccagcactttgggaggccaagacaaaaggatcacttgaatccaatagttcaagaccagcctgggcaacatagcaagaccccatctctacaaaaaataaaaaaattagccgggcgtgatggcacacatctgtagtcccagctatgtaggaggctgaggtaggaagatcacttgagtctgggagttggaggttgcagtaagccatgatcatgccacagcgtttagcctgggttacagagcaagaccctgtctcaaagaaaaggagggtatttaattttcacacatttgtgaatttctcagatttccttctgttattgattttggatataactctattatgattggaaaatattttatgtatgatttcaatccttacatttattgaggcttcttttatggcctaacacatagtccatcttggagaatcctataattgcacttgaaaagaatgtgtacccctctgtagttgggtggaatatcctatcaatggctttttttcttttcttttctttcttttttttttttttgagacagaatctcgctctgttgtccagtatggagggcagtggcgtgatcttggctcactgcaacctctgcctcttggttcaagtgattcccctgcctcagcctctcaagtagctgggactacaggcatgtgccaccacgcccggctaattttttgtattttagtagagatggggcttcaccatgttggtcagaatggcctcratctcctgacctcatgatctgcctgcctgggcctcccaaagtgctgagattataggcgtgagccaccgtgcctggcccctaccaatatcttttaagtctagttggcttacaatattgctcgagtctttgatttccttttaatcttctgccaaactgttctatccattatcaaaaatgggatattgaagtctccaattatgccagattttgcttctcctagaagcagaaggcatggcaccccacatagggccacggtgggaagcagaaggttggtcaggagacagaggaagtgaggacagaacatgggcaagagcatttattatttattgttatttctgtgggaaggaacaagcaaggcagggtaagcacgtcaagaattttctagtttgaacaatttcagggctctggggcacaaagtttgccactagttgtcttgtacctggccttggagtgattaggaaakgggaatagtgagccagagtataagattccataaaggaggtggctgggggtatagactccagattggatggttggtgtattagtcacggttctttaaagggacagaactaacaggacagatgtatatatgaagggaagtttattaggagaattgactcacatgatcatgagatgaactcccacagtaggccctctgcaagacaaggagccaggaagccagttcaagtcccaamacctcaaaagtagggaagctcatagtgcagccttcagtctgtggccaaaggcctgagaggccctggtaaatcactggtgtaagtctcagagtccaaaagctgaagaacttggagtcttcagcttttgctcgagggtacaatgttcgarggtatgatgcatccaacacaggagaaagatggaggccagaagacttagctartctagtccttccacattcctctgcctgcttttatcctagccatgctggcagctgattagatggtgcccgcctagattatgggtggatctgcctttcctagtccactagctcaaatgttaatctcctttggcaacagcctggcagacacacccaggaacaatactttgcattcttcaatccagtcaagttgacacttactattaaccatcacaagtccaacccttgtcaacttgaacccatacatattttctgaaatcatacataatcttcaaataaaggcaataataaggtcataattatgcctaacataatacagctatcctttgcacaactggaaatgcaccaatccccaacccaaatgctattacataaagttaacaatacttaaatgctgatatgaagtcaataaatatctamgtcacatgataaaggaaaaagaaaggaaataaaatgaagatgttttcttagtacaagtgtatacatgcacaaacatgttcttaaaataaggaggaaacagtcatgacaattacagtccttgtttctgcaactggtcatatggtcatagctggtattgatgaccaccttcttctactacccattctgtatcccctttgccttcagcaagcaccttggcagatcatggttttttacctggtgaagtgacccaaaccttcattcctgaagggtctgggccaattgtagtctgcctggattgagctgttgtaccttcccattgaccttaatcacaggrcatggtaatactaagaagtgctcttagggtgtcctatattccacgcctattcttccttacttccagagtggagtagtagactgatttcatcttgatagtctgggtcaatcaccccagccaacactgtaactccctttttagcccactgacttagagataggaggaactcaaagtggctaggtggcaatcttaactgccagtttaatggaatcattgttatgtctcctggtggcagcmtccctccctctgaaactaagacctctaggccagcagaatgtaatgtcacaggaacgggaagcaaaaattttgctagtgggtcactaggggtgatggtaagtggtgccacttccacttccaccccttgattcccggacccatgaatcctggctatgggagaaacagtaccacatatgggacactgatacacagcatacacagccttctggagaaatttgctcccggccctgtaaagtactgtcacctagttggtggtgtaactgtgacccattccaccattttgtcaacccagctgcttcaggatgatagggaacagttggcatatgaaagatatgcctgcaggtgagtcatttactatctttaggaattggctagccctgggagagtcagtccctgcagggtcagtttattagtctgttttcacactgctataaagaacttccctgagactgggtaattataaaggaaggggtttaattgacttacwgttctgcatggcttgagaggcctcaggaaacttacaataatggtggaaggggaagcaggcaccttcttcacaaggcagcaggagagagaagaatgaaggaggaacttctaaacacttataaaaccatcagatcagccaggtgtggtggctcacacctgtaatgccagcactttgggaggccaaggcggttggatyacctgaggtcaggagtytgagaccagcctagtcaacatggtgaaaccccatctctactaaaaatacaaaaaattagccaggcgtggtggtggacgcctgtaatcccagctactcaggaggctgaggcaggagaattgcttgaacctgggaggcgggggttgcagtcagcagagattacaccattgcactccagcctgagcaacaaaagtgaaattctgtctcaaaaaaacaaaaaaacaaaaaacaaaaaacaacccatcagatctcatgagaactcactcattattatgagaacagcataaaggaaaccgcccccatgatccaatcacctccctccctcgacatgtgggaattacacgtgagatgagatttgggtggggacacagagccamcacatcattctgtccctggcccctcccaaatctcaagtcttttcacatttcaaaacttatcatgccttcccaacagtccccyaaagtcttaactcattttagcattaacccaaagtccacagtccaaagtctcatttgagacaaggcagtttccttttgcctatgagcctgtaaaatcaaaagaaagttakttacttccaagacgcmatggagtacaggcattggataaatgctttcattccaaatgggagaaattggccaaaacaaagggaatgcaggccctatgcaagtctgaaacccagctgtcattaaatcttaaagctgcaaaatgatctcctttgactccatgtctcacatctggggcatgctgaagcaaggggtggctcccacagccttgggcagctccttcatgcgttggcattgagtgcctgccgctttttcaggcacatggtgcaagctgttgagggatctacaattctggggtctggaggatggtagccctctcctcacagctccactaggcagtggcccagtggggactccgtgtgggggctccaaccctacatttcccttctgcactgacctggcacaggttctccataaggactccacctgtgcagcacacttctgcctggaaatccagatgttcccagtcagcaaggcctcaagatgtcagataattaaaaatatagatttaaaagacatggttaatacacactctataatctaccacatagaagatataccatatagcttctctggaattctgtcacctccccagggagtcccagggcataggaagaaggtcctctttgccctggaaaccctgagcatgtgtgccctcccagttagggagtgcccagtccctctttagagcacaggcttttcgctctaatccaatcctgcctggtgagctttcacagcatatctggtggctcactgtctgaagagcctgaatcattggcaatccctgaaactagtgaccctttcctcgagatgagggagggtttaatctgccatgagaggaggaaaattttttcgtttcattcctctagtgcagcaaaatagggaagataaaaacagaacagttcagattttacatttgaactgttcagattttacatttaaaatctgactatttatattctgtcacacatatacacatatatgttgtatatatgtaatgttgacatcagagaaatacaaagataaatagtaatgtaaatatccctaaccattctttaaggcctacctcaattgccacgctttggctttctcatttattctgtcctccttccagtaatgttaacttctccctctttttgttcaatagtgcttggtcatgcctcttttagatcacttttcattctgaattactgttatttgtatgtatatatgtgtcttctgctacaatggtcatctttatgtgaaaacccaatatttagacagagagtaggaacttttaaaaagaaaggatgaaatggatgtgatttcctccaaaaagtaataacattaaataataaaagagaaatcctctgattttgcctttcatttgtttgatgatttcaaagttttaatgaaaataaagttctgtctccctgaagaaattaaacaattaaaaaagagtggcctggcctggtggctcacacctgtaatcccagcactttgggaggctgaggtgggyggatcacctgaggtcaggaatttgagaccagcctggccaacatgacaaaaccccatctctactaaaaatacagaaattacctgggcatgagggtgtgcccctgtaatcccagctacttgggaggctgaggagggagaattgcttgaaccctggaggcggaggttgcaatgagccaagatcgtgccactgcactccagcctgggtgacagagtgaggctctgtctttaaaaaaataaataaataaataaaattaaattaaataaagtaaaaataaaaaatagtcatcacttacttaggggagagtcagtcacaagcactcccagcaatgaagactaattctagctatgcctgtgaggtaaaaactgattcagagccacgtggatgaggagagaaaagagaaggtaagggactgtggacaacagactagagaaaaactgaagcgtgaggaagcagatgtactcagtggtagatttgtgagcttctctgttactcatccctgaaacaggccttgaagatgtttctgtccatctgtagctggaagcccctatatgagttctagactctgtccctaggaagaaataaagatcctccctaggaccagttctgtaattctggacctatttcagtaataaagaatatgacctaaagtcataaaagataagttaatatggaagtgtgtcttctttttttttgtgggggggaagagtctcactctgtcacccaggttggagtgcagtggcgctatatgggctcactgcaaactccgcctccggggttcaagtgattctcccacctcagcctcctgagaacctgggattacaggcgcttatcaccgcacctggctaacttttgtattttgagtagagacagggtttcgccaggttggtcttgaactcctgacctcaagtgatctgtcttggcctcccaaagtgctgggattacagccatgaaccactgtgcctggcctggaaatgtgtattttatagatgtggtagatggggaagccaagtttaatatcctttaatatttaaactaaatagaagcttctctttggaactatggccaaatggagatttttcttcatgttactatgaacttttatgtcacatccaatgtcttctggcttgcagctctgatgaagtagcatagattctgagttggtagaaaggttgtaagaacaatgtaaagagtagccagagtgggttaaaaattctgtgccattctctctaagcctgagtcttttagttttgattaaaaagagcacagtgaatgaattacttagatcccttcctaaggkgcttgctggcttagagaccacactgataaaacaagaaagattaactacactccatttctgatatgtggcccagactctctttgggtgaatgacgaggcytagttttggttacacagacgactgagtagatttttcaggtgagaacaagtggaaaaggcaagaatacagtatatgatgtatctaatggtaatttttatgtatattatctaaaaataatggcataaatgggcatgcctatctttagtttcttggtataaaaatgggataaaataggggtccgagtgcggtggctcacgcctgtaatcccagcactttgggaggccaaggggggtggatcatgaggtcaggagatcgagaccatcctggctaacacagtgaaaccctgtctctactaaaaaatacaaaaaattagccaggcgtggtggcgggcgcctgtagtcccagctacttgggaggctgaggcaggagaatggcgtgaacccgggaggtggagcttgcagtgagccaagatcgagccactgcactccagcctgggcgacagagcaagattctgtctcaaaacaaaacaaaacaaaacaaaaaaaaagggataaaatatcagaaacattaaaaaatatctatactaaagcaaagtaaaatttataaacattaaactttgactgtcatcagtacttttaatataactttaatttttacattggggctaagtagaaaataaatattccattaagtattggttccatttatgctctgtaacttttcagttctgctcactcattatttgtagtgtttgaagacttaaggagatagggtataaacatttgtcactttggtctattctgccttcaagtagcaaagcctagattatctgcaaactttaatcaccgtggctaggtctttatctgtgccttgcaactggctgattctgtccctctagtcatggtcctggattcctaccacattggataacttccttcctagagcagggcattcctctacccagccaccaggacaacaacctgaggagaaccctcggtggaggcagagctctccttttcatcaggttgatcacttggtgatcrccatgaggtgaccacatgagtggtcactcattcatgagaaatggacttaaccttcggaactgctttggtaaatctttttttttttttttgagacggagtcttgctctgtcacccaggctggaatgcagtggcacgatctctgctcactgcaagctctgcctcccgggttcacgccattctcctgcctcagcctcaggagtagctgggactacaggcgcctgccaccacgcctggctaattttttgtatttttagtggagacggggtttcaccgtgttagccaggatggtctcgatctcctgaccttgtgatctgcccgcctcggcctcccaaagtgctgggattacaggcgtgagccaccgccggtcatattgagttcccacattttacaatcattcacagtgcttgatacaatcactttttgtcctgaaggagttttgcctgcttttttattagaaccatatttttattatccaacctcagagataaaatacttgcagaaattctaccctatcatgttcacatcaatttgcaaattccagatacttctggatatatacaatattaattccacgccatttaaaggaccctttcatctaagtctcaagttggctgtttgtagtaatgtcagactttcagaagaggcccctgataatgtaaattggtgttcttttaattaccatcattcttgcttctcataatgtgagccttccatctgggttctagatggaaggtactagtttttggtgaagattggaattgaatcaaatggatggtttgttgaccaaacgatgaaaaaacaagataatcagaaaaatttgtgtaaatttttaaagtgtgtttcctccctycccccaaagtgaatgaaaatacttattaagtaagggatcattgcattctactcatacccatgtatgagactttaattaaacaattttctgctattagatatgtttccagctttaacctataaagactaacattatgctgcatattcatgattgctgtttctgtttaaagttaattttttaaagcattaatcaaaatacttaatgttatgctatttctgttttaaagytcttatttttttaaagcattaatcaaaatatttcatgttatgaacataacatttattaaatgtagaattttaaggaaatgtgcctaggaaaaaagaagaratgaaaagttgttcataataccactacttctaatgctttggggttttagtatacctatttccagaatgcaaagtattcctgtaggatgagtgagatcttgtgatacgcaacaagctataaattatatatgcaaagtagataaaattcctcattaaatagtaagcttccattatttaaattttagcaaacgtttaaattatatctataaaagtcatctctctatatttcatctctatttctccccaagcccctgaagcccagtaaaatttattttagatgtggtttataatgtttggaatgacagctaccatgaatataagcagatattcattaaagaacaaaggctagcaatcaaacgattttgagakccctgaaactgaaytctaaaatttcctgggcaaagatgaagtaatacaaaccccccaaacctgcccaacctggccagagatttcccaaatgtccctgggaactcagagctgctgctgcgttgccgactagtccagaggcagatcactggctcacaggaacaagagacaaggctgatgtgtccccaactagggattgctcttccgtatgcatcaagcgatgctcgctttcctcttccctccagcaaaatgtccaaaagggagattatgcctgacttatctactacagctttttagagtaaataatgaaaaagctgagaaataactaatagatcctattaatttgaatcttcaaaataaagtctgacagtttcacaacaaaggcaaatgagctatctcaggttggggaggtgggctgtgatacctggtcatattaaaaaaatcttattagcatctaaaacagttttggaataaataagcaggtttagtcctgcatgactcagaactgacactgatcttattttacattttacaaaggtttgaaaagggagagaacatgctaagacatccagcgcacacctgacatcaggctcctctgcgcaccaacatgctgagccaagtggaagctacaagcagatcttttaaagcagaaatgagccattgaaagarcttcagtgttggtaagcataagcagacaaatgtagggaatmatgaggtaaactgtgcttattggattatggattcacaatagagtatttctagcatcttactttgtgctgggcaccctgttagatgctgtcacacaywttttttttaaacataatcctcaaaacaaatgctgcaaagtcatttatactcattttacatataaagaatctgacattggaaagtgtaagttacccaaggccaaagcccgcacaagaggcasagccatcctggagcacagccttcatgggccacygagttagaatccaaggagaggtgtggaaagggctatagacttcactccgtaaactctggcatagcttttactgtagcaaacactgttaatacattattttagacataattatgaaaaatgttagaaaataaatacaaattactaccctagcctaataacacagcactttttttatatttagaattgtatgtgtgatcttaacatacaacttttccaaaaagagatgtgccagacttggagaagttccagtgatcagcaataaaaacaaatctgctcctagcaagtggttcctgattaactcagtgcatcctgataatatgctgctcggcaatatcatcacagctacacaaaagctcaagttccataacactataatattcttgcatataaatgttaactttgaacttttctgttttctctgaaacaggaaatgaagatctgctgttttttttttttttttttttttgtcccctcgtcctacctgcatctatttccagttatgccttccttttggggaacctctccgcctgctataacccagtcccaccttgtcagtatgcagcgattggctcagaagtagccctgtgactcaggttttcaaatcagcaccattcacattacctggtgtattaatttcctggggctgctgcaacaaattaccacaaacttggtggcataaagtaactgaaattattcccttgcatttctggaggccaggagtctggaatctgttttaaggagccaaaatcaagttgtcagagggccacgctccctccaggggctctaggggagagtctgttccttgctaattctgttggctgcaggcattcctttacttgtggccccatcactcctatctctgcctcaatagtcacactgcctcctcctgttctgtgtgtggggtctccctctgcctctctcttataaagacatttgtgattgcatttgggggacatctgcaatattcagattaaatctcccaggtcaagaatcttaaagtaatcacatctttgaagactgctttttcctcatayggtagcatttgcttgttccaggattagaacttgatatctttgggtgactgttattcaactaattatacttaggcagaattaatgagacgaaatattgtttcttttattctggatgtgggctctgactgtgtgagtctgcagatatattgctattaacaggagagtacctaccagcaaataggatcagcagagggagaaagtagataagcaagacagagagaaacaggggcctgatgacatcattgtaggattcaagccgaccgaagtgaggccaatgtctggactacaaattacgtaagccagtaaattccctttcttgcttaagacgttttttgtttttctttttgcaaacataaagcctaatataagttacatcttcactattagactaaaacttctggaaaagtactcacattaggtccattcataatcttagggattttggaaattttgtatttaaacccaatgctctggaatacccacatgtgcattttatgaacagttactttgagtcgaagacagagtccaggtcttcctgagaattcttgtgaggtttatttttcctctttccattgtccaaagatgttccttatcctggcctttcatcttgtttttcttttagcatcrcctgactcccactccatttctctttttttctcacctcaaaggtctcctaattgaaatgtgctgaagcaattgaaatgtggtaccttggcaaattactgtcagacactgtggcctttggaccagctagaagcttgtcacgaaaggtgacagtgtatgttggtggaaatttagaaaaaagaatctcgtaagaaattttactttggtaaagctgtttctatgaaaagaaaattttaagaagagataggttgtgaaatggggaaatgcatctattgacagctaaatttttcacatgaaatattctgagcatataaaataaaatataccttgcagatacagagatttggggtaatgttaaataacgtaggtttcaagatttaatttcaaggaaggcagctttacaagcctttcttatggagtttctattaacaagatggggaagcctgggctgaatggttagacatgtggcaggtgtgtggccaggtgaaaactcgatcgaagagggcgacaactattgttcatgcagaaaggggtctttagggatgtgcctacacctctctttcctttaatgtgtttcttaataacttcagtaaggccagaagtggcttgtttacaaatccaagcatgacactagctgggggagacacagattaacatattaaaagattaaatccaaaatgaacccgaaaacctggatcttgaactaaatctaataagaccaaccttaagtggcctctgccctaggttaacattcaaattcacaaacaaaagatggggaaactatggcttaacaatactttcaaaacaaacaaacaaaacccaacatttttggttaactgcttgctagatcaatatcagccaaaaatgtaaaaacattgccaaatagttaactggatcttggtgctctggtagaccacagtccagaatctggggaaagatgccacctctcaactccacacctgcctctgtgctttcagtgagaaacaggcagacrgatttgttcaaaggacagtgaccagatgatcaatggcaggaagccacaccatccaaggaagcactgaaagaacaaggactcttgggaagaaaaattagtattcccacatgagtcatggtatgtgttttcaaaattttaaaccatacggagtcctagggcccctctctgaaatttagattcagtagttagggaggagattttcgtaaatgatccttccacaaatctccccagatgattatgatgatcaaacagattatttttaaaaaaaacctagattatatgacttctagagtggcttccaactcttctatgctcctaaaarttttcattttccaaataactgtgtgtgtgygcacacatacacgcgttgtgtgtgtgtgttttatatgtatctcacattgggtctattaacaatcttagggacttttaatattttttatttaaactcaatgctctggaatacccatatgtgcattttattactatgaatatttacttttagtcaaaggtagagtcaagttgttcctgagaattttcaggaatatatatgtctatattatatataatatacatatttatgtatatataatgtataatgtatatataaaaatatattttataatcctccttaaaattgttttatcctcaaatacgtattatatgcttactttttgctgaatactgagttaaatattacagggtagtgctactgcttctcaaaccctgctcacaccccagcccccaatctcatgaaggtctttaggaaatgcactgccaactcccagcctcagasactctgtaaacatagggcagggcctgggaatccatcatttctaaaaagcttcagtgataaaaggctttccaagtttgaaatcactctgatgcagggaacaaactagggaaagaaaatgggatcagttcctatcctggcaccagaaaagcttttctcatgtctaagtgtgaggcttttcatttactaaagcattttgtcttttataaattgacaagtttgatttcaggggcttcaagggaggaaatgatgccggtagaagcaacggttagaaagactgactgacatcagtaggttagtcagttacggttctgcctcaccaggtgtggtgggtgtcaacacgtgacacaggaggctcggggaccagatctgtcatttgtgctccttaattgtttctcggggtttcattgcgtcacggccattacygctaatggaagttgtgtgcactcagcgagggacgagacccctgataattgtaggattctgtgtttgaaaagtaaaggcacatttaatgttttacactttcgataagtcttcctgtcagccttattaatttgctcttattttggtagtcactgttctttcatatgagtagttattttaaaatgagaaaggaacctaaattagcattatacattttaagatgtacatttgcwtccatcataaactttaatttatactttggacaaataattgtaacagttgctataaaatcagttatttaataatagtttttaccactatattgaatgcagcaggagacaggcttaatggcctcgtgtccacaacaaatttccagctattattggaacatccatgcctttgaaaactccacaggccagccaaattcctactgattgcattattcaaatcttgctaaagactagttcatcacgtgcacacagtagttttttattgaatacatctgtttctccaacctcaatttatttcgctttctcagatttatatcactataaaaactactgttattttcaatagaataattttccataatcatatttgtgccccttcatgggacatctgcaattcagttttaaattcagttcaatttggtgggtaaatgaaatacacttaatatttgcatttgtagtagttaacataagatttcaaggggggaaaaaaaaagcaaattttagacayacgccaagatagttaagtaagaaaatttcaactggactatgtgagagaaaatgtaaaataaaaaataccaaagtacggctgggacccggggctcacgcctgtaatcccagcactttgggaggctgaggtgtgtggatcacaaggtcaggagtttgagaccagcctggccagcatggtgaaaccccgtctctactaaaaatacaaaaattggccaggcgtggtggtgggtgcctgtagtcccagctactcaggaggctgaggcaggagaatcgcttgaatccaggaggcagaggttgcagtgagccaagagagcaccactgcaatctagcctgggggacagagcgagactccgtctcaaaaacaaaacaaaacaaagtacaacttgatctctcgttttggcaacttgctttttaaaattatgttccattttcttaaaagtatgaatatagcttcgagttcctaaacgtaagataactttgattatctgaatttaagaaactctgaaattattaaatccaattaagtgaaatactcaaatcatctaatttatttttgtattttctgtaatacccagtgtagcactttgcacatggaaatagaaggcaacatgtgagtggataaatgtaaggatttttttcaggaaattattaaatcttcttgaacttgaatcattggtttagtggcatcaatttttgacaaatcaaatggttctcaatctttaaaaatttgcaatacctaaaaatagtatgcagaagtaaatgaagaccaaccaaatgagaacaagcaaaagatatttatacagagcctgttataggaaaggagtcggccaccatcacttgtattttgccaagactcaaaggcagggagaggagtgggaagactttatagtggagaaaaggcaggctccaggtgtgctctgattggaggccactggccagggaaattggaggctgctcactgggagcagagcatcctatgtgattggtttgggttgtatatttggctttctctgattgatcctaagttggaaggagggacaaaaattaggaaagctgtcagttattaatcaagttctggacttttggggctgaatgctacagacgttattttttaatttcctgtaccggttgctagagagagtagtccgatttcctataggtcagagttacatcaggctgctttcacggactggttaacatagaaaactatttggcttccccagctggttgcaggagattgtgcatcaaagttatatttttatatatattctggccactgttcatttgtagattcagtaccttgagtgcttagaaatggggcaagttgtataatccaatgaacaaagaaaaaattcaaggtgagaacttataattttgtcccttgtgccaaaaatgtagtttggcaatttagttgactttttaggaaatttagtttatagttgtattaaagttacatatgtacaaaatctctagtaatgaatgcagtatccacaacccaaacacacacatatgcatttccccttctgagagatagtcaccttcaactttgttggccatttacgttggtattgaccttcatatctctaactgtcatgtttatactgttaatttaggactttgccattgactcccaccttggragatgagaattcagctctttatttttctaccacccctcaccacaaccactcccatactgcagaaacaccacacttctgtcctctcaatagagttgtatgatacttttggtcagagaaatattcattgttaacattattatgacaactaatgctgttcacagctgagatactattgtataaggtgataacatttcctttccttcctaacattttaggttaataatagacttgttttttgctggcttaagttgctaagcatctaatttctaccaccaattcattctgaattctacccacaaatatttatatctcctcatagtatgcctagtgtattaagtattctgtcaatttcatcttcgtgatgacgtctctcatggatcctctgatcctatccagttttcactaacttttctgcacagctctcacccgtatattataatacctgagaactttttttgcctctattatgttgaatctcttgtatcccaaattctatactttttttgagacagggtmtctctctgtcaccaaggctggagtgctgtgatacaatcacgactcactgcaacctagacctccttggctcagatcatcccacctcagcctcctgagtagctaagaccacaggcatatgccatcacccctggccaattaaaaaaaaatcttttttagagatggaggtctcactgtgtaggccagcctgctctcaaactcgtgggctcaagtgatccttctgcctcgggctcccaaagtgctgggattacagatgtgagccactgcacctggccatatttattttttattagggattttcctcagttttcttgtgggggcagggtctctggttttctactcatatttaaaagtgggcattattttattttatttttttcatcaaattttattttaagttctggggtacctgtgcaggatgtgcaggtttgttacataagtaaacatgtgccatggtgacttgctgcacagatcaacccatcacctaggtattaagcccaggatccattagctattctttctgatcctctctctccccgcaaccccctgacaggccccagggtgtgttgtgccctaccatgtgtccatgtgctctcatcattyggctcccacttataagtgacaccatgtggtatttggttttcagttcctgcattagtttgctgagggtaacggcttccagctccatccatgtccctgcaaaggatatgatgtcatttctttctttcttttttttttttttgagacagagtctcgctctgtcgcccaagctggagtgcagtggtgtgatcttggctcactgcaacttctgcctcccagtttcaagagattctcctgcctcagcctcccgagtagctaggattatatgtgcggtaccaccacgcatggctaattttttgtatttttagtagagacagggtttcaccagttagccaggatggtctctatctcctgacctcgtgatctgctcacctcggcctcccaaagtgctgggattacaggcgtgagccactgcacctggctgatgttgtttctttttattgctgcatagtattccrtggggtatacgtagcacattttctttatgcagtctgtcgttgataggcatttgggttgattctatgtctttgctattgtgaatagtgctgcaatgaacacatatgtgttcattctttataatagaatgatttatattcctttggttatatacctactaatgggattgctgggtcaaatggtatttctgcttcttgatttttgatgtatgtggaggggaaaaggctgactgtcagcattcttttctttttttattattattatactttaagttctagggtatatgtgcacaacgtgcaggtttgttgcatatgtatacatgtgccatgatggtgtgctgcccccattaactcatcatttacgttaggtatatctcctaatgctatccctccccactccccgcaccccatgacaggccccggtgtgtgatgttccccttcctgtgtgcaagtattctcattgttcagttcccacctatgagtgagaacatgcagtgtttggttttctgtccttgtgatagtttgctgagaatgatggtttccagcttcatccatgtccctacaaaggacatgaactcatcctttttatggctgcatagtattccatggtgtatctgtgccattttcttaatccagtctataattgatgggcatttgggttggttccaagtctttgctattgtgaatagtgccgcaataaacatacatgtgcatgtgtctttatagcagcatgatttataatcctttgggtatgtactcagtaatgggatggctgggtcaaatggtatttctagttctagatccttgaggaatcaccacactgtcttccacaatggttgaactagtttacagacccaccaacagtgtaaaagtgttcctatttctccacatcctctctagcacctgttgtttcctgactttttaatgatcgtcattctaagtggtgtgagatgatatctcactgtggttttgatttgcatttctctgatggccagtgatgatgagcgttttttcatgtgtctgttggctgcataaatgtcttcttttgagaagtgtctgttcatatcctttgcccactttttgatggggttgtttttttcttgtaaatttgtttaagttctttgtagattctgggtattagccctttgtcagatgggtagattgcaaaaattttctcccactctgtaggttgcctgttcactctgatggtagtttcttttgctgtgcagaagctctttagtttaattagatcccatttgtcagttttggcctttgttgccattgcttttggtgttttagacatgaagtccttgcccatgcctgtgtcctgaatggtattgcctaggttttcttctagggtttttatggttttaggtccaacatgtaagtctttaatccatcttgaattaatttttgtataaggtgtaaggaaggggtccagtttcggctttctacacgtggctagccagttttcccagcaccatttattaaatagggaatcctttctccatttcttgtttttgtcaggtttgtcaaagatcagctggttgtagatgtgtggtattatttctgagggctctgttctgttccactggtctatatctctgttttggtatcagtaccatgctgttttggttactgtagcctcatagtatagtttgaagtcaggtagcatgatgcctccagctttgttcttttggcttaggattgtcttggctatgtgggctcttttttagttccatatgaactttaaagtagttttttccaattccgtgaagaaagtcattggtagcttgatggagatggcattgaatctataaattaccttcaccaaagttgaaatgaaggaaaaaatgttaaggcagccagagagaaaggtcgggttatccacaaagggaagcccaacagactaacagctgatctctcagcagaaactctacaagccagaagagagtgggggccaatattcaacattcttaaagaaaagaattttcaacccaaaatttcatatccaaccaaactaagcttcataagtgaaggagaaataaaatcctttacagacaagcaaatgctgagagattttttgtcaccaccaggcctgccttacaagagatcctgaaggaagcactaaacatggaaaggaacaaccggtaccagccactgtaaaaacatgccaaattgtaaagaccatcgaggctaggaagaaactgcatcaactaatgaggaaaataaccagctaacatcataatgacaggatcaaattcacacataacaatattaaccttaaatgtgaatgggctaaatgctccaattaaaagacacagactggcaaattggataaggagtcaagacccatcagtgtgctgtattcaggagacccgtctcacgttcagagacacacataggctcaaaataaagggatggaggaagatctaccaagcaaatggaaaacaaaaaaaggcaggggttgcaatcctagtctctgataaaacagactttaaaccaacaaagatcaaaagagacaaagaaggccattacataatggtaaagggatcaattcaacaagaagagctaactatcctaaatatatatgcacccaatacaggagcacccagattcataaagcaagtccttagagacctgcaaagagacttagactcccacacaataataatgggcgactttaacaccccactgtcaacattagacagatcaatgagacagaaagttaacaaggatatccaggaattgaacttagctctgcaccaagtggacctaatagacatctacagaactctccaccccaaatcaacagaatatacattcttctcagcaccacatcacacttattccaaaattgaccacatagttggaagtaaggctgactgtcagcgttctgagaggtgagtgaaaagaagggttgagatgtttcaatatccatcacttgcgctgtcacataaacttattttcaacagggcatgcccaacctcagttgtggcagagtctccacaagtgggaacaccttctgttaaaactttgtcagagaattaacctctcatcttcagtcagagtggataagaggcctcaactcgcctcagctaagtggacaaaggatgatttgggggaagggcagttcactacattaaaaaaaatttaaccaatcctcctggttgcagcctactttaagctccaattcctgaggccgctggcacttcttgtgtacagatcagagcacttcttgggtctcccaaatgctggctggctatggatctgtttttccttgctctgttgagtcagttgccactctttttttgcctgcttttcgactctcaaaagtctgttgctgttgccttctcttgcattctttgccttcatggcttaattacatttccccttatccttctattgttattattttaagctttcaggaggaggcaaaggtaaaagtgtgagttcagtctgccatctttaacccaaagccctgataaattatttgacttttctgctctcagtatcttttcctataaaaagggcctaaaacagaggctaatggtaataatcataagacataattttcatccacatagcacctaacagcatactaagtgtttcacatacatctcatttcatccttctgattctttcacaagtcagcaagcacaggtattgttagtccctttaacctgagtggaaactggatcagagaggttcctgtgtgtcccaaggtcacactgatagcaaggggtggaatcaggactgtgaatycccaaaagaagcatctatgagtcacgtggcctaatggagctatctgaacatacagaggacaattagaacaagagggcactagggctgattctggttgccgattgaatatctgtgaaatttgacaaaaatgacactattatgcaggaataygacatctacatttctaccaagcaaatatttttgtttaaaaaatccaagtaaatcttttggtagggaaacaaaatgaaacctaaatgttcaatcaagatttcaagacaccagcttagttccctggtaaggatgtgtatgatacaagtcatgatttaagcatgaaaccctattgcttagggttaaatactgattttttaaatctcagaagttccctgggaatcttattaccttcaaggctattcttctatcctaaagtagcactgaaacacagaattgagcaggcagtatttgcctgtaacatctgctggtatctctctttttctgctgagctctaagtctcactctgaagaaaaatgcaggcaaccttgggacttatactccttcgcttcttcctgattctgttattgtaatgttcatcctcattttcaatcaattaacacacacccatgaagtgcctcagtgagaggccccaaaggggatgcaaagaagaaaaagactgtctccgccttaaagtggtcatcatctttccagggaagcaaaacatcacattgtagctatattgtagtgaggccaagatcccagttcccatcaaaatagtcacatcccatcaaaatgatctttcagaataattcattcattcaacatctagctactgccctgtacagctatggaattactatgcctgacctagttaaaatagtgccatgttgaacttgggatttctttgagcactctgccatcttctcagactattctgtagaggtgggccatgaatcctgatattcttggacagatctgcattgatgcctgaccccttagctctaatttcatttccttttttttttgagatggcatctcgttctgttgccaggctggagtacagtggcaagatctcagctcactgcaacctctgactccctggttcaagtgattctcctgcctcagcctcctgagtaggtgggcctacaggtgtgtgccaccatgcccagctaatttttgtatttttagtagaaacggtttcaccatgttggccagaatggtttcaatctcttgacctcgtgatctgcccagcttggcccaccttggcctcccaaagtgctgggattacaggcgtgagccaccgcgcccagctcatttcctttattctttcagttatctactgcagtaggaaggggatggttttccacgtcctctctgatgtgagcttccacagtatatcctccttcctgaggtgacagtacccttccctcttactagggccatagttgtataccttgggcggggagaaagccctgcttatcagaaatacagcagatattctctctctcactctgaaaattgaattaagcattataaaggaaataaacagagtgctaattaagagagtaagaggaggaacatatattcaatgggtggctagagaatccctttctgagaagacattaactggaatctgaaggttgagaagaaaccaactatgcaaaagtattgttcctaggcagaaagaatgaaaaattagtgccaaagaaatggctaggtaatgttgataaytgggaaagacaagtaggtggggtttgagctgggcctgctgggcggtactgaaggtcagttcactcaacccccattcccagtcccattctcccctgccttcctccactggagaggaaaatgaaggactaaacttcccccctccactgaagcaagcatgaccataggacatcattgtggctaatgagctgtaggaaaaaccctttgggaggccttcccttctggaataaaagccaaaggccactggaataagtcatttttgttccttgcctttcctctttcttctgtctggaatgccgaaggaggtacttacattttacatcccagagaatgaaactgacatgcaggaaatgtccaagcagggagacagaaggagcctagttccttcctggctttgtgatgtggctgcaccacctggactgcctacctctgattttttttttaatgtgagaaactaaatccgtttattggtttaaataatgacaacagcaaatgtttctagcactttctaggtagtttacatgaattcatatttaatcctcatatgaaccttaaacagtgactaccattgttatcccaatccttagataaggaagctgaggcatggaaaggttgaataatttacccaagtaactcagcaagtcgaaaggctggactttgagaacaggcagtgtgcccttaaccaatgttctaccccagtgttggccgggttttctgttatgcacagattatcagtcctaacttatacatctttgatggatgaatacaatttagttgggagcttttagatcattatctaactagatcagtgtagcatgtggtcagtggatggcaagttagacaacaatttgatggtgagtttatagtaggaaaagtgacaaagatggagatggaaaatagagcagaatgggtaagaaagggagctctggaaattagaatatttgcctacaaatcacagctctaccagttactactagctcagtgaccgtggcctaattatgctgccttatctttataacatttaagtctctagctttaagcctcagtctcctcatctctaaaatgggcatcaaaactgtacatgactttcagaggtttaatgccctagcaaaatgcttcgttcacagtaagagctcagtaaatgttaccttaaaaaacatactaagtttgaatgttttcctctacagcttgtctcatcttgacagtaatgactgtctagaaattgtcaattccaaccacaacatttggaaactttaaaatatcaaagatgaagagagactaaagatgatcttttctttgatgttagtattgaaatgtttttatttttttcatattctgttggaaacccagccttattacagatcacaggacctaggacaccattgttgcaataatttaatctgaggtaagaaagacattgttagcataacgtttcttaatagtattagtcaagctgagttttaagaaacatacctatcaacttcaaaggatttgttttaaagaaagtaaaataaaaaggaactacaaatccatgggaacatgataaagtactataatttccaccctgagttttggaaaatctgacgaacctccaaaatgtgttctgaggaaaacagttgtctcaaaggcacaagaactaatatgaaatgttagttcaaaggctctgggcaaaaagagggacacacagacagacgctctctcctttaatgaaccctcatgtggaaagtagctgctacttggtgagctgccgcctgtgcctttgaacatactatgattcaaacagtgaagtgttatttcacactctctgagttagccagcagatctctaaaacttcccagctcaaaaaagtttgcagaaaccattttcttctagtacttcttggagacttaaacaaaagtagagagactgtacagtgacctccagagggctctgataaaatcttcataaattggctttttgctttttctatagatgattaaccagcctgaaaaccattgccaatatgtgtgtgggcaagtggttactatgtctatacagtggctgcagccgctggtcttgtagatggaaccctgcttccagacaggaaaaagcctgatccgggctctcctgtccccaggggacagggcagttggactattctggtcagaagactgcttttgtgtagggagttgtttcccctagttcaggatgcaggagtgcaaggagagggtacagcgtgacctgttgccccaggtggcctcrgtgtcaggcagccctggtgttctgcccgcacttggatcaaggaagtcaccaggagacctgggctgtccccagcagagtatacaaagcaactctcagaggggatctgactggtgccagggaccttccagcaggtcatttcctgggtctcctggttcctaggaacacaggctcagacatggctgtaatactcatattttctggtaccgtatattgagattgccttgtaagatctgccctgctactgatcccgtgactaaaaggagaatttttagagattatcaacctacctagtcattttacctaaaatagcgaataggtaaaagttccaatcagaaaaagatttttataaaaatatgacctatgtgtaaattgtgaactttaagtcctatttgataaaattaattaaaagagcttcatgagaaactctgttatagatcttagatcatccttattcatcaatcaaagtctagtaattgagggcccagtatactaccttccatgtgcataggctttccctgtttctaaagaactttcatgcacactgtcattggctcttctacaacacagtgaaggtagacagcacaggagttattcccattttgtagatggagaaatactaagggcctgtcatgataaaccaggcagttttactggtctggtgctgagtctggcagctgatattaactcattatgcccagaaagaagagtgtgatgagaaaggacaggaacatctattggaaagtcttcccatctaaatggtaactgggcccagttagatatttccaacccatctgcacacatatagaaccccagcatggagtttgtgcatggtcggttctctctagtatttaatttaaaaatcaatggttaacatcatcaacaacaacaacttttacatcactaatgatgtgccaggaactgatgtttttttttgagacaaggtattgctctgtcgcccaggctgaagtgcagtggtgcaatcatggctcactgtagctgtgactccagggctcaagtgatccttccacctcagccttcaaagtagctggaaccacaggtgtgtgccaccatgccccgctaattatttatttattttgtatagagacagggtctcactatgttgcccaggctggtcacaaactcctgggctcaagtgaccctcttgccttggcctctgaaagtgctgcaattatagacatgagccactgcacccagccaggaactactgttttattacaatacttatcacattattatttaatcctcacaacaactttgtgaagtgtggacaatgattatctttgttttacagataaggaaactgaaacacagagaggttaagtgaatttcccagtatcacacagtgtgagaggctgataacatcttcataacataaaaaagaatatgcaatacactgcctcagtaccaacaatgcagagattaatttatattctgagggtaatgtgagcaaagcaaagaactaaaacctattacctctctgcttttaatcaggccacgagaaggaattcctggggcatctaaaaaattcatcctagtagtttaagcctttatacaaaagtggctttgaactatgcttggatgagctttgccttttgtcagtgacaggttctgaccttaggtaggatacgaacagccacaaaaaagggcacctgctccctttttgtcatttgttcaggtgaaacagggcttcgctggtgacagttgaaatgacctggtttcttctgacccctgtgaaaaactaatgatgtgtttttcattttcattccattttccctggtttcatgtatacacattcaaaaggtgagggaagctgtgaagtgaagtcagtcctgggtgaaaagttctatttgctcctctcatgcctgaagctaagtaaagtcgacacaaatcgtgcgtgtgcacaaggacagggatctgcatatcacgtggccgaggccccactgctgtgcatgcctgcactgtcctctgagggaaagaataatgggggcgagatgggtggggagtgggatgaggcactactcactcccagctttgcttagagatcaacataataaataatcaagtttgctcagcgcctcagagtttacacagagctttcacatgtaattccatttctacaagtcaggaagtggaaatgaactcatttaaytcacacagttggaattcaaatgaagttggactctagatagtgctagctctctcctttatcccttccttccttcttcccttcctttcatcctcctaccttctcttcctacaacttgccatccttgaatatgtcattttggaaatctatacaagaatgcttatttacatttcccatttctctcaaaccacactttcataatcccaacatgcatctaaaagtgggaagtaatcatttcagcaaggcctagataagaaaacatgagcaatggaaacaatgacaatcttttcttttccttttccatcggttacaattgagtgaccttgggaggtatccaaatgatcattttgtccatgcttcttggcaaatacttcagctagcttaggaacttgccgcacggggttaacctcctaattcgacataacgttttggataggtagggatgggttatggtcagatcagttttcattgttatatttacattttgactttaatggggtttggacaaatctcaagagcagagttgctattgccaggccccagcactgcacaagtacagccagcaattcggcccaccgactggcaggatgggctcctgccctgggcatcacacacctataaaaataaatttgttaaggaacatacagccacttctgtcagtagaggtctggtgctcagtgttaaagactgcataaaactttaccctaaacttttgctttcaaaaccaacaccgttcgggccccagagaaacacttctcccctatagtcccttgtccttgaaacaaaggtgagtgcatcccacaacctgaagatttgcagggtgtgctgctgctgacatggaagatggacactcctaaacgtgtggatgatgtatagtggaggcgcttgattcaaagaaaagtcaaatgaattaaactgtcaaaaccttccttttagatagcaagcatatcatacagtcttaaataatgagggtttcctagcaatgccaaacattcattttcttgcttctctttttgttacaattcatggttctggcagaagtcatacagcagtatagcatttgcatgcggttgaacgtggtgattggccaatattttgaaaaattaactaattaatgttactgttaaaatggtagatatgaagttataacacatgaaacataatactgattatttatgttagcaaccaggtggacaatgaatgctagaattgctaagtttatgttttatttacacattaataaggtgtaattaaatttccaaatattaaataaaatgtttatgctttaaaaaaataacttttcagtgtttatattcattgtcataatttgtattttgcattttaattctaatagataactttaaatcatttgaaagaaaacttttaacaactatagaaaaataattctaattttctgaaataaaaaaaggaatttacatttgtggtgtaagtacaaacattttgtatgatttgactacattaatcctttatttatttattttttagaattgggatttcattctttacccagacggagtgtagagtgcacagctcattgcaacctcaaactcctaggctcaaatgatcctccagcctcagcctcctgagtaggtgggactacagggataaaccaccatgtttgactatttaaaaaactgttttgtagtgacaggatcttgccatgttgtccaagctggtctagaaatcctggcctcaagtgatcctctggcctctgcctcttgagtcgctgggattacaggtgtgagccaccacatggggcctgaatagatgaatcttttagatcaatgttgttcaatagtgctttctatgatgatggacttgttttctctccatgttgtacaatacattagctctagccacatgaagctactgagcatttgaaatgtagctagtgtcactgaggaacagaacacctgaaatgctgttaggtgctaccatacagaacagcaaagctttcaatcacygctgtcaatggaacacaaattaagtgaaaatctcaattataacaacacagtgattttactaaagagaaatatcaattttatagaataaatatatatgaatcatgtatattacttatccatatagcctatcaaagaaaatctagatatgtataatgtctagcagatatgcataattcagttgctgatattttgctttttgtcatataaaatctgtaggttttatmtttcaattttattgttatatgtgtcaaggtaggaatatacatagtagtttgctagcttaattaataactttgaaatattaggcatatggtaagtggctatgcatttgtactcttgcccaagcctaccaaygtcaggggctggcctgacagcacccctaactctgagcagccmttctgcaaatgtcactattgtcctcagtgagtcaggagtgaaatgtggttaaaactaaatctctactgctgaaaaaacaagtcaaagcaaatgtcccactgggaggattcctacagcatcccttccttagaggaagtccaatccattcatttcagcagaggacttccatttaggctcaaaggctgctctgaccagttacctgtaagagggagtaaactaacagtagttgtcatgaattgagagggcagaagctgctggcaaaaatcccaccaccctttgaaatgtggatggaaggctgcaaagggtagagtcaacttaacagtgtaaagatagagaacaggggtaatagaaatttacagaccctcccactaagctttaagtaacaggcagaagggacagggtttgtagaggttaccaagaggagtcctgtggcagcagcagttggagtactggcagggatttctgtctaatgcctcagtggcaggtccgtagagtggccctttcctcttccatccagctcctcatcgtccccccgcagggggattgagtttcccttgcccatagtggtaacctgcttattgacacatctcatatcgatgtctgcttttttttttcttctctgtcttgctgtctcaccttccttatagtgctttctgggatcacttccccaattcaaaaccacttatagttaaatcctaacctccaggtctgtttctgagggagcccagcctaagacaacctccagtacttagcacagtgcctgacatatggtattgactcagtagatatttgctgaaagaataaaatactttgcaaatgaaatcctaccctaatattaacttcacctaatttaaagaagttactctgaagcaaagtgattagatcaacttttgtctccctagcttccacctctgtcctcccactagcagaaaaactccattggaaagcctattactaattttttttaaagcaaatttgaactgcagtatagaacacaagtacatcaaaatggaaagcccaggttgcagatttgaccatcctcacttgctgatcttgaagacattgcttcctttctgagatttcaatgttcatttcacaattaaagataaggttccataagcacatagttgggagaagtggcaggacaatgtaagctcatattaacaagcaaatgattaatatagagacttctaaagagcaggtctggtaagtatctagtaagtggacttcctgaagtaagaggagtgttggttgccacactaaaggcaagtcttctagtccccaaatttgccttgggaggatgacagctgtatctttcttggttctggtgtacagtggagaacagggtcaagatgagtgtggaatccatttatttttttacgtgtttataagcactagaaagcagtgagcactaagcagaggacccctcttgcggaaaaagtgcaggagagctcctgggtgcctctgtatcaccggtttgccttctagccagaatcattgctagaaccctgtcactcagttactttggttcctaatttaacctcttcccaagccttctattgcgttcagttagctaggccaggagcttacagctgtctggttggtgctggctcaatgtgcttattccctggaagatagaaggatcacttacaaaaaaatttacaattaaaataaaaaaattattttttgctgaagcattgtaaggtttttttaattcactcagacccaaaatcgtaaaactaaaatatttcaagacattacttgattcaccccccacttctctttctcccctgtttctcagcactttgcaccagatacagaaaccacgggttatgtccaaaccctggttttggtgtgaccaccgccttccgtgtactgcctgcggctcgcttcgggcccacacgggacaccgaggcatgatgaggacgcagaacagcagaagcgcgccctgcttcccgggcgccagtgctcggggccagcggcgtgtacccggcgggcccggccgggagcgggctggcgatcgcggggctcggcgctcccggctcccgcgccatctcccggcgcccgccaacttcgctccgcccgcggcgtagagaagctcgcagccctccggagcctcagcgatctcctggctcgcttttcccgcagccgccgagcagcgcaggcccggcgactccgggtgcagctggccctgtgcggtgacatcgccgtccggcgccaggctcgaagccgcctggccgcgcccgcggggtcgcaggccgctggtcccgcccggccgcgctcacaaactactcgcggctcgtgacccgggacaaacttctggcggcggcgcagcctcttccacagtcaccctccccagagccagctaccaaaatagaagacgcggccggggcgaggaggtgggcggggggagcccggtggccgctcctccccgcgcggctgacgcccgcttcggcggcggtagtggctgtggccgcggggccgcccccagccgagctcccggaggcgctcgggcgcgggccggcggggcgcgggcgctcacgccctctagcgggccgcggcggcgccgggcggccgtgacgtgagcgctcccttcagccggcctgcggggcaccgccagtcagtcggggagcaagagccccgcgcgcagccggcgcgggctcggtcatcggcgcgccgccgcccggggctgggcttggggctgcctgtggagaggcggcgggcggaacgcgcgcggccacggccacggccaccgccacggccacggccggcagctcgggtcccgggtcccgggcaggggaaggggagaggcggcgagctcagcaaccggaaccgagggaagattttggctccgcgggctcgccctccgctccctctgccagcggcgccagacgccgagtggggccagggacaggggaggaggacccaggaccctgtgcccgcgcccctggagccgctggagttcggacttctgcaactgttggcactttgggggcttggcttagcgctctgctgtttacccgtctctcctcgctgcctcggaaccaaagctcccggccccctccgccctcgcgcgcccacccaccgccgccggggagcggcccggcccgcactcagcaccatgaggggacttgggacttgcctggcgactttggccggacttttgctaactgcggcgggcgagacgttctcaggtaagcgggaccgcctctgccgcccccgaggcgcgcgggccggcgcgggacgcccgggacgccgacagctccctggtggtagagccctaaggctggcgtcggggccgggcggggggcgcggcgggccggacaccgcttctgcctgtgagccgggcgctgggcgakgggccgtggggctggcaggcacccagtcctcgggcgggcggagcggacggaccccgagggcgagctccccagccgggactgccagctcggccgccgtccttccgcggcctgggctagtgctcaaggttgggcggcttgcactcttgagtccctggccggctgcaaaaggaacagcagaaaactttgcttgaagttcccagttgcagccgccgggccgcctggcgtaggcgctgcgcggtccccgccgaccccgagcagcggccgggcccaggccgctggtgttcggctgcgcccgcagcgatcgccgggaactggcggccgctccggcggcggcgatctcccggtgccctgccctccctgtcgccccctgcccggcgcggctggcgaccccgggaggtccccgcggtcgtgcagcgtctgcggagaggctggggggagttcctcgccggtcccagcggtagggcttggcggccgcggagggaagcgggcaggtccccaggccctggccacggccctgcgccccgctgggctccccctccccaccctcgtccccctagcggagcgccgcggccagctgcaacttgttcatccagcccggctgcccgggggtcccaggtgggaaggagaggcactggcggtgtgcgagcaagcgtgtgagtgtgtgcgcgtgtgtgcctgcacgcgcgcgcgggggcgttctaagcccagaggaacccctcacggagaggatctgtggatcggagtcgggggtccggcgtgggggcgaacccggcacgctgtcacaggggtttacaaccaggatgacctttattacctgggtgacacaggtggatagacggcaaatgctggcccatttgcacaccttctttctagtgtttattagattagtttcattaaggtccacatgcagtgggggcggtgggctttctttttctttaataaaaaagcctgctctttggtcttaaacttggtttttgcaaaataggtctctgcgtttgggaacaagtgagttgaatgagtaagttgggctttttaagaatttaatgaagaggactttcataaacagtaaagagcatattttaagcagtaaaaacctttggtcctccggtgcgtggaaacctttttattttcttggggtccaggaccattggctgctggagctctggactcacaggcacattagttgtgtcttgtgtgttgctgatctgcaggacccttgatcacagttggcctcagagaaggagtggaacgtgtaggttttgaaacccaaagcatcaacttcaatacagaaatatcctttctccaagttttgtgtttccctaactgcctggtaattgcacgtgctccagaggatttaacacaatgatgcactgtcgtctgattataaaactgatgcagaatttggtctgtgttcttattagtgaataatagagtagaatttgagagccttgtaactcattagtattagaagccaagtatgagagccctagtgatggttttctctttattaacatccatgactcccttcttgggatttgtttaaagttaagctgtgtcaaatatcatttggatggatttttaaattgtgtgcaagggagtggaaacaaatatttatattgcttatttaaaccatgggttcctcatcaccaaaaaggatttcagcctcagttgtactgacccatgtccttgttaaggctgatgtaaatgatcagtcaagccaaaatagacttctactaaaatttagcctgatttttcatttggaagaaatatatctatttgtttgagttaatcataccattaagtgaaatgtgttttcttttctatctagaaagccagagttatcctggcatgctagtgggtaaagggcagcatccaagccatgcctcagaaacgttgaactttaaaaaatgtaaaattggattagctgggtgtggtggcgtgtgactgtagtcccagctgctctagaggcagaggcaggaggatagcttgagcccaggagtttgaggttgcagtgagctatgattgcaccactgcaccccagcctgggtgacagagtgagaatccgtctcaaaaaaaaagtgaaaagtgaagatggcaaatttcatatgtgcaaggatcagatatgtttcacttcattatttatttttctctccatattgcgtttaggtagtacaggtgtgaatcagggttttgttttttgtttttgtatgttgaggaagttaattctgaatgctaggagtggcattgacacatttcttttttatgtttcttccagaaattgtagtaattggctgcttttcacttgacatgggaataaattttagagccagaagagctagattgtaagctccctgagggcaaagccaattttcgttttcttctgactttctcacaaaacatttctcatagatccttagatgtcacaggcattattactatttgttgaataaatcactaatgagaatcttgatcatttgcacatattcaaattgtgtgtgaatggaccaatatataataaaatggagggagagaagtgattgttaaaagttagacttggcttgccttttccacactgggttctctttaggccaatggactaatcatgagggtttataaatataatcagtcaagggtttttgtataactcagacattatctacacaaggcactctgccctttgctttctgcagtgctctcctgtcctcttttggaatgggtttggaattgttaagattgttaattaaccatttctggaggtggactacatgtgatttggataccagacatcagaaatagaatgctaaacttactggaaaagtattaggatttgggcctgtgatgacattgcttacttataatgatggatttcattacaaaattgtgggttttttttttttttggagatagagtcttgctctgtcgccaggctggagtacagtggcacgatcttggctcactgcaacctccacctcccgggttcgagcgattctcctgcctcagcctcccgagtagctggaactacaggtgtgcaccaccaccaccgccagctaatttttgtatttttagtagagacgggttttcaccatgttggccaggatggtctcaatctcttgaccttgtgatctgcctgccttggcctcccaaagtgctgggattacagacatgagccaccgtgcccaggctgaaaaattgttttttatcattaccgtttctaatttgttaggcaaaataatggaggttcactttatatcttctaggtctttagtgttcactaaaaataactggtaagatggtatataagtaagacatgagaaagaaagttaaattattttacctttgttggaaattcccttttgcatggtgagaaaccaacgagttggcaagttgttcctctttgacccaatttcttaaaagccaagttgcaacatatattatataatacaatgaagtgtttagttctaccttataatggttttgatgtgttaagttctgctaagcaagctttggtttgcagaaatagaaatatagacttagctctttgtttcagctacagtggtatttgaaatatattaaatgttaacataaccttgtgaatttgggactcgtggagaaattaattttttaaaatattttaaggatgtttgtgggaaaacagctgaaatctgaataaagcctgtaatttagttagtagtgtggtaccaatgttaatttcttagctttggtaattctgctctgtgaatgtaagatgttaacattagggggaagctgggtgaagggtgtacttgcacagtttgtattgtttttgcaagtcttctataaatctgaaattttttcaaaatacagaattttaaagcaccctttgcaaagagtggtaatatgtttgtttagcagttaagtttattttttctttttcagataactatagtcatagcattttacattttcaaggtgctttcgctagattgaaaattgataatgaagaaaatacttcaaatttaaatcagtgagcatgaaagaaatatgctaagaaattactataacattcttagtgttctgtatatgtaaagaagaattgcttgagcataataaattgttccgatctagaaaattataggttttagtctctcatgttttcaaagggttatttttacagattttaagaaaagaatctattgacatgtagtgatatatggataagtgtgtatataattttggtaattcaaaatgaattttctttaatgaacaagtaatttgaattatgtcttcagattatataaattctttataaatgaagcatagcctagcctttagatttggtaaaagttggtttcagaatttaagcaattctgtgacaattctagaaaagtcaatacctttatttaaatttttcataattctctaaggattgtaatatattctaggaattgtgaggctgtatacagtagaggaactatgtattagattaaatattgttttctttcaatttttgttttagatttcattaagtttctagaatgagcatgtattatctaaatatcccaaggcttagttttcatttagggaatcaggcattttaatgagtttyatgcttttcaacagtgaaacatttttcttaggggttatgtccaccatgcattttactttagttctgagattcttctctttgaaamccaactttcctatagtttcactttttagtgtgcttactatctttatgaatataacatgcatgttaataggcttattttataagcgagggaaggtttaattattaatgtctttccaactcacaaacattctaaaaaggtacaaaataatgtaaatcttgcattataagaggatgttgcttttttgcttcctaaaataccgcggtggttttcagtttagtcatcagaaagcctgagttgacactgtagctctgaaaaacccagcagagaaaaataagttgggctgccttgggtggagaggaggaaagatttagtcaccaagcttcctagtctgtagtgcccccatcattggtgargaggctggcaaggccagggcataattaagggtctgggagtatgtgagagaaaaagacaaaaacaggatgagaagagaagtgttgtgtactcaggtgtgggatgtgacaagctctagagatcttagcaagggagggtcactccccttgtgccctcttagctatgaaggagaaacacatggaaagttgaaggagggccatgaagagtggcagttgtgcaggtagatcacagtgacatcctgcctcagtgacgttaggtggctctggggagggcctgggaaactgcaccagtgttgatggtgagctaggttttaatctgtgcttctcaaaacctgctgtccacggggagcatctggaggcctcctttcaaaggctgcttcctggggcccagctgtggtgattctgatgtccacgacagaggtcccccagcatccytgggtggtcagggtttgtagccacagttgaagaaacgttgtcctgaaagaggaggtttttgttttgttttgttttgttttgttttgttttttttgagacaaagtctcgctcttgtcccccaggctagagtgcaactgagtgatattggctcactacaacctctgcctcccgggttcaagcgattctcctgcctcagcctcccgagtggctggaattacaggtgcctgccaccacgcctggctaatttttgtatttttagtagagacggggtttcaccatgttggccatggctggtcttgaactcctgacctcaggtgatcctcctgcttccacctcccaaagtgctgggattacaggcatgagccaccacgcctggccctgaaagaggagtttttaaagtgttgtccttgagccagcagcatcagcattacattgaaagttgttagacttgcaaccctctgaccctgaatccgcaaccctggggatgaggcccggcaatctgtgttagaacaagccccccatgggattctgatgtgacctgagattggagaacccttgttctaaaagaactgagatcttctgcctgccctatcagcctcccttgacaagagctgaaagagaactgggggtaaaaatatcacatccattcattcactgcttagcctcttgattaatacggccggtattaccaacatggtgatgtgatcgtgttgtctctggccagacactggggaagagactaaatccagccagttgtaaaactcaaatgaataaaaaagtttcctatgtttttacttaccacgatgtaacaattaaattttgttgtaatggttagccattggaaatttccctgggttgatattttgtataggagatatttgttggcttgttataataagcatgcagcccagtgtgcttattagaatatttaatagtgcttattaataattcttattgaaatatttaattcaaataaatatttattgagcacttacatttgtacggcccctttgtggatggtaatgggcaaggataaagcaggtatagttaccacactttgagaagttattcatttattaaaatttcaaaatctactaaaatggaaagaaacagggactttctcaggagagaactggaagttagtagatgtaagatttggaattgtaatgtggaattgtgaaactttgcctttggcaataaactcaaattccaaatagaaagaaaataaaggtttttcggccaggcgcggtggctcacgcctgtaatcccaatactttgggaggccgaggcaggtggatcacgaggtcaggagacggagaccatcctggctaacgtggtgaaaccccgtttctactaaaaatacaaaaaaattagccgggcgtgttggtgggcgcctgtagtcccagctactccggaagctgaggcaggagaatggcgtgaacccgggaggcggagcttgcagtgagccgagatcgcgccactgcactccagtctgggcgacagagcgagactccgtctcaaaaaacagaaaaaaataatgaagatttttcttggacatttatttaaagtactgacaatgtgtatcctaaaaytgagcctaatttttctctgaaccctcaaagacaaccattgcatctctgtcatttaacactccaggtaaataaaaataatcatgatgtcttttaacagattgatcctgagcgctttgtagccggcctttctgagaaacagctgaagagtgcttccctgctgccggttgctcctgctgccatccgcagctgatcactagrtgtagctgcgtcccttaacccccctgcctgagccaagcaaggtccagccccatccatagatggcttcctggacagctaaagaaaggcacgagagcggactttcatccgcttacgtgtgcatctctaagtctttattgtaaaattgagttctttagtgggagttgtagttccactgctacttgtagtgtagtttgttgaaattcagcactgatccagagacaactttagattcacctgctacagtcttactcaattttttcttttttctgctgtgtcatatgttgctgctaatctacatgtagtggtaaaactggaagaagtagtatatatttgccaactaagtaaagggttcatgttaacctttggggccttcttgtagtagaccagaaaaagcagtggtgtggatggctctgtgtaggtgtgtaacatctttargacatggcttgtctgtacttttcttacgtctgcaaggagtgacttctacagcactgagggtttaggtatgtaattcaagaagtcatgaaaatctgcctggaaatctgattcagccatttttcctgcttaaaactcagaagactaatgagtcatcaaaaactttatatgaaatgcaagtgttgggctttgggttagaagtcagggcagggtggagaatctgattgaagatggctgtgtggcttcctttcgaaactggggctagcaggggttggaaatgaccttgcaagctaaaagagcaaggattgcaggacatacaggagagatgaatgagaggagaggagtcagagacttgtcaaaactgataaggttttagcatctccctctgaagaaaaggccactgtttaacagaatgatttatttcaacatgcaccagccaaagcagaagcaaagcatttactttttatgggctgcaaagcataaaagcttatagagcatcagtttttcagatgggtgaatattcattttaatctctctttctattcaatatgcagaaagcagatttattgcatacaatgagaagagtgcatattagtgtgggttactctgggagtctgaggccccattacttttccctggcttctagctatggaatcaaaatgggctcacaggtaacaggtaggctttgacagagggtgagaaggaattggaccacaccctttgtatagtctgtgtttttttgatttttttttctcaaggcgtcttgctctgtcatccaggctggagtgcagtggcaggatcactgatcatggctcaatgtagcttcgacttcctgggctcaagcagtcctcccacctcagcctcctgagcagctgggtccataggcacaagccaccatgcacggctaattaaagaaaaaaattgatagagatggggttttggtacattgcccaggctagtcttaaacttctgggctcaagtagtcttcagcctcccaaagtgctgggtttacagatgtcagccactctgcctggcccagcctgtttttgatggatactatttgttctctcttctctgtttgagtagcttgaggtactttacatcatgtaataagcacatgcttaaaatgaacttaaaatggactcagtgtgatgttccatctagatatacaattataaggtggtttaaagcattccttttaacatactcataatgtgtaaaaccagattacttaacaattttagcatgtagtagtcactcaataaatatttgttgaatgaatgaagaaacaatttaaagaagctcccttggagaagaaaaaaatcaaataacttatgcttaaggctgttttttttttcctacttcctatcaagtttgacttaggtatctccaataaccttaacaatagaaccaggctgtgtgtttagtgcctggtgccattagcaatttataggtgtatagagacacagttgctaaatttaaaggaaaaagtattaccttttgttaattaaatatataaaagtaagactgtagttttattgtgtataataaaaatgtataaatcagttattgctataaagtagcattttgatataatactgatcactaaaaaatgaaatttactatgcagtagatttatcatgactgtactctagggggatttgatttagtcactggtatattaaaggaaccatggtatcaccagaaagaagattccatgacagggaataatatatattatctctgctgccttttatttctgatatagaatgaaatgaattatacctacacagagctcagacagcatcatgataacatcaggctcatcttcattacagcaggcatgttctcgttcctttttcattcagtgtatcatactctcaagtgataaaacttaataaaaagaggctactttgacaacaacctcataaactgtgttttctacttcctcaacttctgaagtcttgaacaccaaatgtggtgtaaaatttccaccatgagttcaggtcattggctctcattggcattgtgttctgtgtgtgtgtgtgtgagggaggttctccctcgtctctctgtctgtcatcattttcatcccaaatgtgtgactttttaaagagcctctgcttttctttctaatcttgctcagtaggcaggggcccctgtgagacagctggttgagaatgcttggtatgtttggagtgcagcatgctttgtcagagagggacaggacacagtgggggtctgaggctgtgacatcagccatggggatccctgagctgttgaaagaagggcagtagtagcctctggttggatcaggtcttcctggcattgagttctccttctacctctaagtagccatgagaccttgggtgtgttatttcattttaaaataccctgcaggatgatgatgatgattatgatgatgatgatgataatgatgatttttagacagggtctcactcttgtcacccaggctgtagtgcaagtggcatgatcatagctcactgcagccttgaactcctgggctcgagcgatcctcccacctcagcctcctgagtagttgggagcataggtgcatcaccatgcctggctaattaatttttttttttttttttttttgagacggagtcttgctctgtcgcccaggctggagtacaatggcgtgatcttggctcactgcaagctccacctcccaggttcatgccattctcctgcctcagcctcccgagtagctggggctataggcgcccgccaccatgcccggctaattttttgtatttttagtagagatggggtttcactgtgttagccaggatggtctygatctcctgacctcgtgatccgcccaccttggcctcccaaagtgctgggattacaggcgtgagccacagcgcctggccaattttttttttttttttaagagacagaggtcttgctttgttgccttggctggtctcaaaacacctgggttcaagtgatcctcccacctcagcctcccaaagtgctgggattacaggcgtgagctgctaatgcccagcctccttgcagagttattgcaaagactaaatcagagaaccaatgctgtgatgtcaggggcccctggggtgatagggcttcatgtgtaattagtggtcagaataagacgggtccatcagtctgttcccccatcctcatgcagattacagatttaagcataggaaccctgtgctttcataagtgaaaaagtgktgaatattggcaatttcacatgattcagactaacacatcccctttctgggtccaaggctttgatagttgtggtgctgggaggttgtataagtgacatagaagtatgtgtatgtggttatgtatgtctagattttataaacagggccaacattatgtttgaaaagaaaaaagccccctgaaattagcaaaataatcatgttaaaattggcatcatgaaaagccagcactgctcggtgccatggaaggccctgcatcctggatacctgcattacagtcacctgaagcacttgttaaaaatgcagattcctggccccaccagacctacagagtcagaaactggaaagaaatacctcatatgattttgatcttctttaaagttgaagagctactggaaggaaagtaacagtgactcagagaccctgcctttgtattgaatttatcacatctactatgaggagtgttaagaaagcatctgaggattactattaatacatgaatttttacatagcaaactataattggccagagagcatttcttttataaagcagaggcttttcagcattagaagagaaaatgagttatgaaacaattacattatagaaacttatctgcttcgtatatatcttgcaacttggtgacctctagtaaatgtggcatcactctggaatgtttagaatatagtgaaagaataaagacattttggagtaatcagaacacagatgattttagatctctaaatttgccaatttgagctgcattttgagatgactcattcagggaagatcatgagacaagatgatctgcaaagtattttgggaagattattttccagcacttagtcctttacttcatgttcattgaaacatgtgaacgttgtggaatgatttgtcttaggtgccccataaggatggaccaaaagcttggtgctttgattgcagtagttttaaaaagtctcacaaacctcaaaatgggcatattggtctgttaaagcacttgaaatttccactagctcatcattttggccaaggaagaaaggtctttgtcaaaatgtcgtctctaggagaggtggctcattaagttatcttaaatatgacatctctaactagctgtcacctygataagttgacatctttagattctcccttgtaaaatgacatttgattcaaggatctctccaatatcttaaagagtatgaggattgtcatcagcttatgtcttagttcagattagtttgtcagatggcacagcaaaagagaatgagacttggatcattgggtcatttttgataggtgagcatgggagacatgtctagagcactgggtcccatctgagagagtgcctgatacagcatgaggttgcttgctaacaagaagtgggtgttgaagggctgtctgcaagattttagatgctttgaacatttgccataggcttcatctgctaagctatgcacttagcataagcgaagttcactctttctctctgtacttgagaatgtagctaccattcacaggtgacgccaaaggctcttcagcaactagactgttaaggcctgtggctttcttcttaaatattgataatatacgtaagccttatttcaggggcttagcattgatagtcataagtgataaccatatattgagcactaagtatgtgctaaatagtgtgctgagagggtatgatattctcaaacttattgccccccatttacaaataaaagcttggctgagagaatcaacggagactttgggaggtaaagtcgtctccactcccaacccaaccatgtcatccgaacgtggggtacatgtaccatattatgtctccctccccatacatacacagagtagtgttttcctgatttatgctttactttgatgccatcctcctgtattgaagtgtgctctaagaaaaagcatttcaaatgtagtgttgtggctgctaggaagatattaagtgatgttgtattatgtcatataaaatccgtatgatgaccttctggagagatttctttccggttcagggaaaggtgtgattctcctgtgcagtcagattcttctcgtggacacagtgagcaatataacccatcaactttcttttttctgtcggctgttagaaagccagattcaaatgcatgttttgtagtagctggaacttttatattgaactgaaaacctcagtcaaagctggcctgcatcaaacagggaatttkttggctcttgtaacaggtaacagagaaggccaaaggtgggcacgggattccaagtcttccttgctaagcatcttttctctctatgtgatgtttctaaggagttacaggctaaatccctctggctccaagcctagtggaaagagaaattctcttccctcatggtacaactcactcctgtgattgggctccaagaaaaaaataaaaataaataggttctgttaccagttgaagagtagatagtacctggacgaaaagcagcaaactgccagagcattcatctatgcagtcgatgcttgtttctgggtctttttgctggcctgattcttagtcacttctcacatcattttaatttattttgctgtattttatgtatcattataaatgcattaaacctttttgggtggtggcagaaagtaaattagtttcaaatctcatcatttgcatcagtgctccaaatgtaccttttgtgtgtgcatgtttcatttactttttttttttttttttgagacaaggtcttgctctgtcaccccagctggagtgcagtggtacgattatagttcattgcagccttgacatctcaggctcaagtgatccacctcagcctccagagtagctgggactcccaagcagcatgcggcactattcctggctacttcacaaaaattttttttgaagagatgacttctcgttatgttgcccagactagtctcaagctcctcgcctcaagccatcctcctgcctcagcctcccaaagtgttggggttacaggcatgggacaccccacctggcataaaatttatttttttaaagcatcaaaatcttttggctaagcaaattttacataggtagaaatgtgtacaaatcttttggttaaataaagttttatgtgaacatatttttaaaaaggctatccaaattggcaaacaaggtatattggttagctattgctgtgtaacaaagcacctcaaaacttagtgacctaaaacaaccaccatttactaaaacttagtgacctaaaacaaccaccatttactattcttcatgttctatgggtgcctctgctgacctaagttgggctcggtatactttgtgtatatgtgtctctcctcggtgatcttggctgagctttcttgaaattttgctgctgtccttctgtaggctggtctaggatgtcctcagctgggacagttggactctcgtacatgtgatctctcattccaaagagagagcagaagtgaaccaagacttctgggctaatgcttgggaagagtacgttgtcacttccacctcttctcctggccaaagccagttacaaggccagcctagaatcaagggtggggaaatagtcctcactccttggtatgtgaggctgcagggtcacatggtaaagagtacggatacaaaaagaggtgggaaattgggacttacagaggggtctgctaggaccagcacatatgacctaaatgcctcagcttctcagaacagttgggaaatcatgggcagcatgggaaaaagaaaagtttagggttggaagaactgcgttcaagggccagcactgctgcttactgtcatctgaagggtgaagttgttaacttcggtgaactcacttccttatctgcaaatagggtcaatcggtggcattctcattcatgggtttacttcagagatcaaataatatgaatttttttcaatccctgtgtccctgggtgagttctgaaggttataatagcctcattaaacttgagttctcaaggtggctgtgctatttcctcactgtgagaatcacatagcttctctagtccttcatctgtgaaaagggtatgaattctacttccttggtcatcctgtgtaaaacacagtgcccagtccagaatagctgctgttattgttggagccctatgactacagaatagccttgagcaataaccttgccttgtatttttcctttatgtctacaaaccccaaagggtatggttttcctcagccccagtttttcttccatttgtgatcttgattcataaatttgctaccatttctcctggtttcctagaaataaggaaaaaggaaatgtgacaattgcatgccacctaggtgctaggtcctttacatatcatttatatacttctccaatgtgatcctattaggtgaagatgacagcactggtattttagggtttatggaactgaggcctcaacacatttcagratgtcccatggacagtggctacagctgattttagatccaaaagtgctcatttccctgggcccaaagcctgttttcttgtccctgtctgttgggtccaaagcgcatgttataattttcaagtatggcttaagaatttggtacagtttctcattttgatgttaaaacaattgtaagattggcacagcccagaagtgcagtgtacttactgctattttacagccctctgaaatagtaaattaaaaggaaaaatacttagcttcttagtgacttgactgaaattaattggttagagaattacttatatttttcatgagcagaggagggcagaatgttgtcttttctctggttacaaatcccgtagatagaactgtgtttttgtaatttcttgtgttttccatccgaatatctgtttaacgtgaaaggtgcaaaatcctttgtaaatctctagtctgtatgcctgagtggtcttagggagaaaatgccagtaaggtaagcaataatttaagacctttgacttcaagtggaggtgggaggccctaggagactgatgttaatcaccttctttagaacaaatttcattgccttttgaggcttgacaaagtaaagaaaacatgtagatctgtatttgaaggatttaaaataatctagtgagtaaattcttactttatccgcaatgggaaagaactgtttggtatatagtactctacagtggttatgtactttgcttatttaaataacattcttgcagtgtcattagggagaattacatcaaaataaactgcattaacaaaagtagaataagtgagtatcgagaatattagcatttttcagagtgactttaaaaaattatgcaattatgaattcagacattttatcaaaattatttatgaagtaatggtcattgtcaacagatgcaagtttrtaagtaagtactgattttggaaagattcctgggcagatagagataaaatgaggtgtttgtcgtcgattgttagggatgagaaagacctcaggactgggctttaggagatctgagctctgatgtctggttctgctgccatgtagcatgtgatttgggtcaaatctcttcatggtaactcaaggcccagaaaagtaaaattgatactctaataatactttttggctacctaaaataaagacgaagatcagtgagaaattgtgattgtgttggcatttttttttttctcttgggatgctttctgaatacatattgtttattagattctgggtacccccaccccaagattattctctcatgcctcagttctataaacggaaactaaacacagtggtgagaagtcctccatggctggaagaatattcaagagttgtttgcaaggcatattcttttccaaatacaatgcttacctagcactgagagtgaaatgaggtagaataatatccccctgctggacgaggtatctgtgccttctgtgggtgagtacccatttataagtcctgtgctgaggccctgggagccaggcctgtgctgagcattgaagatataaaggtttccaagatgagggtttgtcgttaaggagctcayaggaaaactgaagggatatccaagcaagtcgagccctctatttctcaactgacatagacagcgtggaaattagggagggagagaggaggttgctccttccccaggctggccttggcaagggagcttgaggccaagtgtgcaggaggaaagatccgtgggaaaactgcagggaaagctctcctgtggtcacctaggtaactaggaggtttgcagttagacaatagacacgggagctgcccatgaggcctttaggcactattcaggttgatgcagagggaagggagagaataaacttttacatagtcttttgaaatggtttttaatttttttttctcttaaaacgggatgtcttctaagcaagtgagttttcgaaggctgtggttatcttagagtagatgcagaaaggagaacatctgggaaattgcagagaggattggaaattgcagagaggaacgaagtttgaatagtttttgtttttgaacttggtggcttggcagtcttcccttctgtcccatgcagatcatatttggtgctgtatttaagggatggatttgtgcgggattggaatttggccagaggttggaaaagtgttgagtattggggaagattcatgactcaaaatattggctactgttctattcccatgcctgatatcaaggtccaaggctttctctctttttttttcctcttcttcttttccctcatctatctccctctcatgtgatagatgggttttgaaaggaagtggtaaaccaaacaggtatctgtatcccacttaaccatggccactcctcttgtagtggcattgtcagtggccaggccgcttgtcatcgtatttctcctctgcagatgtggacaggacagagtgttcattcacatagagtgaattggtaagtgaaagcataaccagtaccatgcctggtgaggcactgggtggtgccttatctactttatatctaatcagcactgaagttcttgtgtgtaaatgtgtaataacaccacaaaagaacagctgatactcatagaatacttaaaatttctaggcattgtcttaagcgctttttaattatgtattatctgatttaatactcataacaacctaaattaccctcagtttacaggcctggaaatcaactgaagcaaagtggccaagatcaggcaaattgtaagggtagagctgagatttgaacattatcagcttgatcctttcagccactaacctacagtttgtagttctttgtctacatcagacaggcttacaatcacgctgcatacatcgtgggcttaacctgcttctgtttcaatatccgggatctttttgtatgcttctctgttggttggttagtcaggagtccactacgggtggatgaatggttcaggtattgtaagtgcactggcaatgaggtggcaggactaaggacctgggggaaagaacatcagtccttaggcacttaatcaggttgatatctttagtttggggggtgacttttagaacaaagtcaacagataggtttgcttattttggagattatattataatataaaccagccaaactgttagggttgggagcaaaaccagggctagatactgcgtgatgaaaccttgccagtgaaatggctttctgagcagggagctgatactgctcagttccaaggtctgtggggcattggcatctgacttaaaagcctgtatattcaataaaagaatgtttaataaaacagcaactcaaagcactataaacatttaaaaacagaatttttaaatactaggcattccttgcacattgataagttcacatctgaaatttgcatgacataaacatacagttgagaaggagagaaygtatgccctatggtaaatattgacattttaaaatacaacttgtacaaacatcttttaaaggtatccattgtaaagacccaagtaccaaagggattcgataccctccattgtccatttaaaaatatatgaacaaacttttatttaattgagagaaactttacctctttaatttttctccttaaactggtactcccattttctttccctatagaatcatatcctattataacacatttgtgcttgaaagtctgtgattacttatcaggcttctctgtaacaaaaatatgtaaaaagttgaaattttaattctatatttaattttataggagtataaacctttaagtgttagatttttatgtagttgaattatcactagtatgtaatcgaatcattgttaaaatttattggaagaattgtttcagaaatcaactgggctttcgatgaaatagttcatttatctgtgggtagatattacttactggttgagttaaactgggttaaacatcaattctatttccatttttcatttttataaataggtactgagaatctttgttcatataaatagatggataggattagccacttctttgaatttctttttcaagtttcatgccaagattcacatcattatctagtatcagtaattatttttaatgacctgttagctgacagtttgattaagctcattctcaaaattgttgaaagcaaaaattgggaaaccaagtagtctcaaaaggatttgttgcccagttatgcaccctctcatttgctgggaagtagaccaagaggctttgcaaagatttcytcaatgactgttaatttcacctgttgttttttaacttaaaagcatcttgtttaacccagaaatatgaagaagtcattgggaaaacaaaaataatattagtttcaatatactttagccaatacatgttttaaatatatttatataaataaatacacacccaaacccacatatgtatagttaaaccttagaggtgaagatttaggctaatcaataagtgaacaatatatgattccatcgcaaagcagttctcatcaagctgtcggtaaaatcagacgtgctttctatcagataaagtctaacatagtttttaatttcaagtaagttttaatttgcattttgaggaaaaaatttttaaatggtaaaaagaaatgatatgacagattactaaaagcagtttagtcaattttgaagcactgtagatttaatagaattaatcatattttgtaataagttataaaaccataatgaatctactttgtttcttattagtctataggaatgccatataatggacacctaaaattatgagctattataaagtgaggattctgattaaaaacatgctatttttctggtaaatgtgtatgactgtttatactgaactccggcatttgacttctgagaataattaaacagtaattatatatatactttcagaaataactacattaatttccaaagacttcagggtccaactttgtatttaattcttacatatttaatcaaatggaggtatgtgctactaaaaataaattgttatagcagctagcatatttttgttaagaggtagaaaatactaacttatgaggattgactatcattggaaaaatcactacataaatatttgataaaatagattttaatgatcttactttataatgcacaccgaatctaactaaatctcatttttgtgagtttttattgtataattagaaaaatttggaaagcattgcaattatacttaaaagaatcagtgtcaggaatcttcacacttttggttgtttgaagattcttttcttgacagctaatgtgatgtttgagtgtgatcataaatgctcacaaaaacaaattgttaatgattatatttggaaacaccagaagtaattttttgtgtttaatatttaccagtgtcatctttgccttaatgtcaccagttcttctgctctgaaatgtatcctttaaccgtggtcacttgaaggaagatgtgtggttgttaaattgtatatctaattttataacacctcacagggaggaaaaccctcaatctctagtacattgctttacttttgctctgttgcctaggctggagtgcaatggtgggatcaggactcactgcaacctcaacctactgggctccagtgatcctcctgcctcagcctcttgagtaggtgggaccacaggtgcataccaccatgcttggctgatttttaaattttggagagatggtatttcactgtgttctccaggctggtcttgagctcctggactccagtgatcttccagactcagcctcccaaagtatggggattacaggtgtgagctgctccatccatcccattgttttactcttaaatgaaatatggatttgacagtgaaagacaagaagccctccagcgaatgtctgttgtttgaaagcttccttgaaagcagcaggtcatgtggttcctttggtggctgcatgggagtgtttacaggtgaggggtatggctttcttttggcagctatgargtctgttgagaaacagcaaatgggaaaggagaatctacctgatcctagcacagaaacgggtgccctttggcctgtcggtgttctgtacccctgagtttccatagccacggagtgtggctctgctgggactctcatactcatggtaggaatgctggagctgggccctatggcccaactttaatctttctagatagagacctgaacacttgaaagtgtgacatcctcccctgcaactcccccccaccaccctggccaagaggcagaaatcaagctggtgaattctggtttacaatatagtaactcaattctggtcttagtctgtgactttggcaaatactgtatgtctctctgctcctgaaatcaaaacaagtaattctgacataatataatgtagatattaagactttattagtcattaataattaaatgaacactaaacaaaggcatatactcctcatttaacctgaaagaatcttgcaaaaccattagtttcccatgctgtaagtaaatgttttggacagtgggtagtttccagctgaattcgcaccttattccaggaagcagaactttgagagaacaagaagcagatagagctgtagagatgcttaacacgtgctgcatgtcatcaagccacttattatgtgacattcacctttacacttgggtggtctttccaacttgtctctaatgggaagcaggtgggtgttgttatcttattacatggatctggaaacaatggttaaattgttggttcaggccctagcagaagcgagagcatgggtttcccctgagtgagttctacagagtggtggcaaagcttttgtaacgcactaccgaagaaaatgacgaagcacagggaatggatgcttatcccttttgctaatattaagtcaagtttctccttaatttttcttcaggaaatataacactggcatcttaatctttgtatataaggatatttataataagctttgaacgggactgaagaagatagtaaggtgtgggggattatctgaggtcaattcattgatcagtggctgttcccagggtgatgggtcatccaaaacagaggtctccagagtgtgcacacctggagggtggaaagatggtcacttggatacctaaagaaaatagtggaactttttccaaatatgataaatgtctcctgaggaaataagagtggatatatacaaagaatccctgaaggcgtattcattaaggcattatttggagaagtaaaaaaattgggaacaacctaaatatccgacaatagagagtggattaaatcctggtatattcatgtaatagaatgccatatagccactaagaatgatgacaagaatatttaagggtgtgagataatcacaagatagtgatgtgggacaaaaactagtgacaaaatcatttgtgtaggattatgctggtactacttaattatttaacatgtttattgaaaaatctttggaaatgtatggaatacaagctaaaatattaaccacagttaattatagatagtggatttattggtattttactttcagtttttctggatctaccaggctttcttgaacatgtttatgtatccatcttatgatgagagaaagttacttaaaatagctattatgtgaattttgaatccatgagtgtttaactcagtaaagaaggaactgtgatgattttgtgagtatgtatgaactggctggcaaagagtgactctcatttcctgcttctagaaaccaaaaagtgaaagaggaagatttccagatgacaaaacttatctccatttttctttgctttctatgtgtaaaacacaaaacatacaaaatgtaggtgtgaaaatgcatccccgtgtgttttttaaaacagattgtatccttagctagttgtcttctaatcctcatttggctgtcttttcctctggaattgtttctttgctgaagtgttaatggattggttaatttgtgagcaacactcctaattgtattaaatctctacaaccttattaagcatttgtgcaggattagatcagagagcttggagaagcagcttgccagtggtcagagggagggagtggggagagccaggctaacaagtgagtctgggccactaattgatatccctaagtcccctactccccaaaataaaacaacagactggaaaccccaccactacaagttcagaagtattctaaagcacatacaacagcttctgtgctgtatgtttaaatgccattaaagagagagaatatgcaagccaacttattctttttacttttatttgagggaaaataaatgataattaacataaagaattaacgaaaatctccagagtgctaggtttttaattctagttgcttgtgtttatatttagacaccaggctacaggtattctgtgcttaaagagagggaaacaatttcaggaaatataattgaaccgtgtttattttgaaaacgaaagataataaatagtctgaaatatactgacttttatgaaccgtgattgacagctgccttctgcatgtaagggaggtgaattcagcacctgaagatgctggctgtgcaattgagaagtggggaaggggagaatgcatgatgagagattaataccaacctcagggggctctccctatgtgtcccgttgcttattcctgcctgctgataattctgttcccagaaaactttgaagtttatttcccagcattatcacaacagtaatggaactcccagtaaaaattttagtgacccgttgtttgatttaaattatttattgcattacatattttagcatttttgaagtaagagatactgtagttctgttaaggatgaaaaccaagtcaaacccataagcagtcagacttgttttaaattggatggtaccagaggtttttaagagccacctgaaaaaatagaaaaataaagacacgaaatggtttttgaggttttacataatccatgtttctacaggcgacatgggagctaggagagtaaaaatagggcaaatagaacaaaatgtaaagagaagagtaggcaattttgccttttcagtgctttgggagctgtaactcatcatatattccactcaacaggtcaggagagccatggggatgccccaagggtgtcatcaaatgctttcttgccctctgccactctctcaggacttgcctggtcctaagcagagctgtcaggcctctgcccacctgcagggggaaaatcactcctgtctcctgacgctacccccagttatgtggtacagagctgcctggtgctatctcagaaacataagaggaagaggctcctcagttaactcttcccttgcccaggggctattatgaggtccatgtaatctttatagtcagcagggtcctagaattgggagggtaaaaattggagtgtgtgctataaaaaaggggtgatgttgatagagaaagttgtcaagaaagagcaacattcccagggtttgattgataaatacaaaggcaggtgtgtgtgtgcacattcaagtgtgtgagctggggaagtgttgctgaaccgagacagaacatagccctttgccttggaggccttccacagygggctgaagggagactcggaggttctgtccatatctgtgagaggtgaaaaggaaaatggcttctattacaacctggattagaaaaattcctagacatggtggcaggtttcttctgttcctttcagattttctgagtccttgtaacaattgaaacacatttcagtcagttaaatatataggatattttctacaataaaatcagtggcaaggaaagtgtgcaaactgcttagttaataattgctggtgtggagcatctcttactttgctttttcccccttaattggttgagtattaataaactcatggtttgtttcaagggcacagctagtttttaatggtcttaccgaaatttcaggaagaaagctaaagaattaacataataaataattattgcttccagggttttttgtcgttaagataataaaatgttaaaaagcaagccacttgagcggaaagtaattgccctgataagcaccacacaggcagcattcacaataaagcagcccttccctcaatgtcagccagatttgcatcccacataaatgcttcctcacattatggaaatgtactttttctatcaacagagtagaatgaaactccaggcttctaattaatcttggctgacatttgatttcatacccaagttaaaggcaagaagcggtggagcttcccccatgtacatgaccacaggcaaatctctccattaatgtcaaattgcatctgtgcatcttattgtcactgccacatgtcagtcattaatgcattagcaatcacttacgtccactttctacctgctggttccctgcttgaggaaatgggcattgcaggaattttactttgcaagcctttaaccttgaacctctggattaatgacataaagagcttactcagatataatgctttacagatttcagcttgcctttgcctaccctgcacattgtaaatctcaacagcttggtgaagaagaccagacacccacagtttacaaatgtggagaccaagacttagaaaacctacatggcttatctgaggtttcatggaaggtaaatggtagagctgggatttgaacccagaacttcttaggtccgatgtaatattattttctctaaatggattagagagctccttgaggggtagaattaagtagctttgtcactctatacgaccctctccgttctttcccagtcaagtttctgttgatgttaaggaagcagtacacattttttattggaaaaagtaacaaattcaaatttatagacaaaatagtaaagtcagttccatttaaattatttgaagtgggtcataaaaagaaaagaaaattgtccaggcgtggtggctcatgcctgtactcctagcactttgggtggatcacctgaagtcaggagttcaagaccagcctggccaacatggtgaaaccctgtctctacaaaaatataaaaattagctgggcatgatggcaggtgcctgtaatcctagctactggggaggctgaggtgggagaatcgcttgagccctggaggcagaggttgcattgagccgagattgtgccattgcactctagcccaggcgacagaacgagactctgtctcaaaaacgaaaaaaaaaaccaaacaaacaaaaaaaagaaggataagaaaattactcacatcagggtgaaaaagtaaggtgtgtatatcgctcattagatgttggttttaagctcgcctgctgtcctgcagaaggaaatgcagaaagcctttgtctcagagagaaaccattttccttgttgctactctgaggtttccacccagggttttatgtcagaaagttggacaacagaatgggtgatgctcttctcattaacaattttcttgtcaatatggcagaataatgtgtgctttttaaaaatctggtctccaaattaaaggaataacttgaaaacaattgagtgaaggtagttctatgggaggcaaagatgatgtataactgatttgatttagaaacaaatcagcctacctcacarggtaaaaaatagcttcttttaaatgatcatcctcaaagcccacttctcgggactgagttttgacagtggggacaacagtagtactcttgaagtgtcttggagttctggggtctttctggctaagggtgttgtagaatcaccttggcagccaatgtgccactcgttgaatagctccttcagtgacttgctaggcctgatgttgacrgaagacaagccattctcttaaggcccagaaaggtcttggttgtgatcctagagctgctgctgttgatgaaggcagggatggcttttgctggactattttaatttccatttaccttgaagccagcatgagaagcatgcctggagtattttggaacaggtattgtgtggggagccattatgactataggagaactttaggaaggtgcccatgaagtatcagaatctaagcaacattgatgctttcctgatgtgcctctgaggaggaattggctgcaaaatgcgcctctaggtaatgaggcagattgacctgaggatggaatggcttttttattagctatgtaagtgttggggaatgtctgtcaaacagtgattttgttctggcatagttaatgttgagccttttagggggacaataatgagatgaaggttgtttggtaacattgctctatgataatgtcatcctaggagacttagcattgtaagggaggcccagcatgtcaaatgcattttagtctacagtgaagtctcaggtggctacattaaaagcagaaagtcgtggcacagacttcaatagtaatgttactctatctgcattttaacatgtttactatcagcaatagatgatgatcttcatagtgatattattaagactatttcttgtgtaatttttgcatctttgctgttcatctgagaatatttgaatttgtgcacarctgaagccatttgaggcttgcctgtctgattatttacgtagaacaaatcaccctagatatattagtggatctctgccaaactgccttccagaaacattgtacccatttatatccacacctctgaaagatgcacctgaatcatttgaatcttttcccacttgtttgacaaaagatggttttcttggaaaaagatcgaaaaagtattggtaaggtgttttaggcatttgtgtatggtagtacccccttatctgcagttgtgctttctgaggtttcagttacccacaatcaaccccagtctgaagctactacatctccacccttgtgctttggggcccttatgaagtgaaatatgtgagtgacttgagcacaggcactgtcatacggtgacagttgaccagagaacggagtcagctactaagtgaccactgggcagggagtgtagacagtgtggatcctctggacatagggaggagtcatgtcctgggtgggactgagtgagatttcatcacgctactcagaacagtgagcactttacaacttatgaatcgtttacttctggaattttccatttatgtcacaatgccttgtctttcacctgacttcatcttatcccatgggcatttcatcatctcacatcatcacaagatgcagggtgagtacagtacagtaaggtatttggagagagaccacatccacatacttttattacagtatattgttgtaattgttccattttattattagttgttaatcttttactgcgcctaatttataaacttcatcataggtatgtgcatataggaaaaaacatggtatatatagggtttggtactgtctgcagtgtcagggatccaccaaataggtcttggaacctatttttggggtacaaggggggactgctgtatgtttattgccttttcctttgcttttttcctactggagtcattatctgatttgtttgttaaaactctttgtagaaatgccactcactcctttccttctcttcaaagtattttcccttactttcttcatttatcttttttttttcctttattttcttttttttcagacagtttctctgtcacccaggctggagtgcattggcacaatttcggctcactgcaacctccgcctcccaggctcaagcgattctcgtgcttcagcctccccggtagctagaattacaggcacatgctaccatacccggaaaatgtttgtattttttagtagagactaggttttgccacgttggctaggctggaattgaactcctgacctcaagtgatccaccctccttgtccttctaaagtgctgggattgttgagccactgtgccagccttcgtttatcttttaattcatagcgtttttgtaccatagagaaacttaactgtgtgcacatgtgtggtaaagggggaatgattgactacttttatgagcagcagtagaagccttggttcatggaagacctccagaggccttgaggtgtgaagtggggctggtgagagaatgctgttctctctgtgttctcttctggtccctttgctgggtctcagacttggatgctaatcgtttctttacctttcggatcaatattgtcatgggaggtaattttcccccaagtggacagattcttgacttactagagtcagttttgttactctctttggcatgggaatttaattatgtattttagtgggaaggtgtgagcaggatgaaattagacacagataggtagtcactgccacaacctgaggtcagctgcagttttcttaaaaagtcactttttgctaataaagtttccgtccctgcttctccattcatgtattgcactcatctacactaagctgggtaggcaggaatcatgaagtggattatggaatgtccagtgggtctggatacatagctcgcatatccattaatagcctgcattacagattttatgtaaagtgttagttttaattacgtaagcattagatttcctgtaaagatttcagaaaccacactatttgaaagagagtacaaatttgcaaagagaatacacatgtagtggataggtgaaaagcttactccctaaaactatccagatatggacaattcagggtcatctgtcaggccatttataaataactcatattagcattaatcaatagtgcagcgttccaggcctgaaacaatgcatttaaaaaatgggatattttgcctttaaaaaaaattgttaatatagacagtcctcttgaaattagtggggtttaggtataaatttagatcatatttgtgaatgaaaccaaggccaatttaaaaagctatgtatttaaaactacaacaaagtaaaattctttttatcttaatccaaatatatattggtcagtatttcttattccagagctcagaattacccaggaaatctttggtttcctaaaactcaaaatgtttattgccaatagctaagtaatatcttctcgtaaacagtgtggctcaaaattatgatcctatgtttatgaaactgaaatctgacttaagtgcttgtgattgtgtttctagttatacaaactttcataggaatgaaagcaaagcataattctgaggttaagacaaacatgtttggtattcattaaactctactgagcacgtctacgtgtgtttattgatcatctactgcaggcttagttctatgctcagttctttgggatgcagggacagaaattaggtactcagaaatttctagaaccaagtaacattatttttaaaatagtgcaagtctgggtatccttttataacagggtttctaaccatagttcagctttgctgtattaatagtattgttgatgtcagcactttcttggaagamatgttttttgcttattcaacttttgcctcatgttagatttttttttctgctaaacattgctgttatcttagtgtttgttttttgttgactggctgtttggcctgagaatttagttctgaattccttttttttttttttttttaaggcaacagaataaacaagcaactgtgtgtcccttggcgcggtagccaatttaaggtgattcatacccagttacttaatagtaaagtctcattcctaaaggatataaactctatttcttgcaaggatgcttaaagagctgagcaaatcttaaagcattattatcacattttagactaaataaagatattttcgttcattctaattttcgtcattcccaaacacactgtggccttctgtggcatgagtagtttaatcaagtgtttagaatttcttggcctcaaccagattagaggaatttaactcagctgttgttgagaagaagtaattcttcagtcactactgaggttttgtaagtgttattgttaaaaaaaagaaaaggaactttgaagtctttattagaaaataaggtgaactcattgtgttttatgtatgttctgagatagagttaaaatatttcaaaattactacggggcaattttcaagcttaaaataaaaaatggctcactacccctggacaggttgaatttgtaattcatagctgaaccgctaaagttagcatgcagattacactatgagagttcatgcaggtctaaatagtctcaaataattctttaatttgtctctacaagtgtaagtttactaaaagtactatatggaaattccactatcccagcttttgctgggtcccttgctataacccctgactcagttccttgctttcagtgagagctcccaacagctctcatcatttctttctgtggcttaagtctgtgcatgctcccagttgccacagcagagtttctgcaacctggggttcacaggatcatctgggggtgcttattcaaatgtagcaccctgctacatttttcattccagaggctaacacagggcccaggagaatctgccatttaaaaaagccacccatgtgatagaaagccctcttgagggaaagcaaaggcctgtttgtgatgagagctgttcttggcctcccttcttgtggcaccctcccgagctggggactgtgcactgtgcatttgctactcttgaagcacacttgaccttcacctttcaccctagttcttttgcttaggtgctgggtgggatccatccaccttgctcctgggatcttctacatgccttttaccgtctatctgcatgtcactgccattgcacccttctcctgtaatgcaccctgctttggtgtaaagtcagttgctctcttagctgttctcataatgcttgaccctgctttcttttcacacttactgcagaggttaggagcaggactctggggcccaccaatctggatttgaaacctagctcctcctggtctagctgtttgctgaagggtaagttattttatctttctgagcctgagatgcctcatgtgtagagcggggagaatagtgactacctcacagtctgttgcgaggaccaaatgaggtaataaacatccggggctgagaacagtgactgtcaagtagttagcatgcctcgaaggccagccattgccatcattgtgatttctaacatcggctttttcatgatcatcctacagagctctgcgcagccagaaatctggaggcagcaatcttgtctcccctttcaaatccagcacataacacacyacttgctccccacaccaacccacaagtgttgactgaattgcactgactttacttgcaaatgcatttcctgacttcagtgtcaccagacctcatcagtctgtggctatcaaatacattctgttgacttcagtaactcaaaagtccatgtccttgtgatcaccaccttgtgcgttgtctctacccgctcccctccctgaaggacttggttcccttgctcattcagcagtctctccactccaggccctgcccttcccctgcttcctcactagctgcaggagggagtaacctgctggtgctggctgtgccaytgtgtgctcttgctgcctgcaccggtaagcttgcttgatgcacaccaggctgtggcccaagaggtgcctagaggaagacgctgcgcccctcagttcccctctgctgcacttgtgtctacctgggcctctaggtgctgtcagggtttcagaggaaactgctcctgcatctgcagggagctctgctggactgagaacaggctcacctcctgagaaacacagaacctgaattcatgcttggagaagacaacaattctccaaaggctgacctcccctgtgtgaccgagccccggagcccctctgttggttcaagatcctgcattggggctgcagaagcggctggcccagtggcgtggctttcctaggacagaaggattgctccaccctacaggggaacaaatgtccaccttttaggagacagaaaactggctgttgtatccaaattaccgtttttctagcccgcggtttctgaacagtttcgtggatcttaagtctgagtttcagttaggctttcctccccactggcatatctgcaggaaggacagtcctagctctggatatttctctgcccccttttatttcttgctgtatgagtcactactctcccccggtgcattagtttcctggggctgctgtaacaaatgaccacaaacttgccagcttacaaccacagaaatttcttctctcacagttctggaggccaggtctggagtcaaggtgtgagcagctacgctccttcctaaggctctggagacaccccgttccgggcctctctcctggctcctggtggctgttgcgagccttggctcatagctgcatcactccaatctctgcctccgtcttcacatcaccttctcctctgggtttattctcttctgtgtgtctcttttaaggatctttgtcattggatttggggtctacctgaataatccaggattatctccacattgtaggatcattgatcatattttaaaagaccgctttatcaagtaaggtagcattttacaagtttcaggagttaagacttgatgacttggggtgttcattattcaacctgctacacccgggtaacagtaatctacattctcatacatcagttgcattgtacccatttcataaattaatcttgtgccatttaatttggtaatctggttagtgctaggaatttttcatatttaggggagagagaataataataactacagaaacagtatatagttycttgagcccctaggcatgctaggcactgtcacacacaaatgcttacactggcctgggagaaaggtgccaccattatttgcattttactgatgaggggacttaaacctggagcacttaagtaacttgctacggtctgcttagcaagtcggtgacagaatcagcaatgaattggccgtctccttcaaagtctgtgctctttaaagtggtcaggactgcaggaggtgacctcaagtcagagctgggtggggaccttggtgtagttgtttctaccactaagttggtggtaagatcttgggcaagttatccacttctatgaacttgactccatctagcacagtaaaaggactgtgaaggaggaattaatagggaggcacaaattaaaagaagaccagtgagaagctttgggtttggttggattcagttgaatttaacattagatatttgggttatctgggaagtttgattgtggcaatttttttttttttttttgagacagggtcttgctctgtagcccatgctggagtgcagtggtgtcttcatagctcactgtaactttgaactcctgggctaaagggatcctcccacctcagcctccctagttgctgcaactataggcacatgccatcttgcctggctaatattttattttttgtaggcttggggtcttcccatgttttcaagactgtggcaatgcttttttttttaaagcatattatttactatagagctttatagaaatgttaaataggactattgtttagttagtcccatttctccttgcactgtgaacgtggaaccttaaaaataaaagtgttggcatttaaaaaaagcttgacaatgcttcagtgaatttaaatatatataatatatatatttcaatacttgacactaaaaatattaagagaaaatatgagttattatgaaaatatctaagaacgatgtatttggaattattattattattattattattattattattattatttgaggcggagtctcactctctcgcccaggctggagtgcagtgttgtgatctcggctcgctacaagctccacctcctgggttcacgccattctcctgcctcagtctcctgagtagctgggactacaggtgcccgccaccacgcctggctaatttttttgtatttttagtagagatggggtttcaccatgttagctgggatggtctcgatctcctggcctcgtgatctgcctgccttggcctcccaaagtgctgggattacaggtgtgagccaccgtgcccggcctggaattattttaataatctttggtcatgctgtcagttaactttatggtaaataagtaattggagttttaactgtagaatttgttttgttgagattcattgcaaaactgtgagactactttgcaactccgtcttgggagattggtgttgaatctttctggtaaatgtttgatttggatgttaagctaacgtttgcagggcccctgcctgttaacagctacctgggctttgcctgtttggccttgactcttcttcctaacctggggtgaggtctgcaggatccatgtgaggccagatgtgctccatggggagagtctggtgggcagatcctgagtgatggacttcccatttctctctccttctctgctttgctgtcaggagtatctgtttgtctgaagcctgctgattctttctgttcctccaacttcctttctgtaatgccagttggtagctttggctttaaaatgggcaaacctcctgctctcctggttcagaattagtgatttttatcctttcagggatcatgctgtggaacacacagcagcctgtggagtctgctaagcccgattcacaatggagcattgatccctgctgctgtgtggcaccctggcctctgcagcatacacatgcttgggccaggatcaattttcagtgggttttaggtctgacacactggctttagtttatagtaacatcgggggcttgtgtctgcctaaccccatcctttataaagtggggatcagtgccttacagattttgatgccaacataattatttataaaatcatcacattacataagatgtgctgtttttcttttttcacacaagaaatgattttcatttgatgtattgatcagtgtagttactgggaattgagcccaatacatttattcttttatttgagatctgctaaaattgtctcttccttcggaagactgaaaaatgatccaggttgtgaatgagttgttccaattcttttcatgccgagcagggctttacactaaatttgggacctgaggggccagatttaggatctggagggttaagagtgagacacagcggctgcctggccacatgccagatgcaggaggtaaggctggaggttcgtgaccagtttggacatagctgctgctctggtaaaacacaaacatcaacaacgaaaacttgattcctgtggaatatgtgctataatctaggaaacagagattctctggtatgggaaatccttgaagtcttggcattagtgacagcacctggaaatactcattccaattcaaatgagtctgaagtgggccctggaggggctgcatggggaaatttgcaagtggtgtytgtgccgggaatgttaagtattgatggtgatgctgaatttatgaatatggaaagaatgcgtgtactcagaaggaggatgcaaacagattttaaattttattttgacattaccttccagtgcagtgcatggttagcagtaactgtatacagaaagggccacagaggctttggtttctgaaagatgtctgggagctgccctgttcacctggtgccatacttcctcagaaatacagaaagagcacgcagcagccagcaaaggtgtacttcagctggtgtccctatttcttctaatttagtgttggatggaatgataaaatagttctaatatgctcatatttgtctgtggtagtacacagtaattttcagtttatttgatatagctgctataggtcctcaaaatagagttttgaattttctttcttggtgctgacaaattgataccatttggaatacagagaaaaagtttcagtgcaacacaggtgaattttttaataggatatactaagtaagtttaatctctggcagggatgtccgatcttttggcttccctgggccgtgttggaagaagagctgtcttgggccacacagaaaatacactaacactaatgataactgatgagcttaaaaaaatcaccaaaaaaacccatgttttaagaaagttaacaaatttgttttgggccacattcaaagccttcctgggctgcatgtgtcctgtgggccatgggttggacaagcttgctggagtattaataaatattgtgaagcagaaaggctgtgcttatataaaattttgatgataaattcttagaaattagctgtatttatcacactcattttcttttaagaaatcagcaaaaatgtcccccccccacttccgttctagtaccatactttgtagcaaagagtttttggaaagaaaagagattcttgttcatagcacatcatcattcttttctcctatagatgtataagggaggcaaggtgaaaatgagctcgtctttttaagctcttgtcgtgaatcgaaccaaatctctttggttattttaaggattatttccttggttattttgcagagttccagttgtgtgggatgagttaatgttaaccatacactacttatttgcaatgttacctgttgtggacagctctggttttgcttaagcgtgtgaggttcaggccctcattctgcagtctgaggctgtggtagtgatttgggagaggtctgccgtgttgtcagcccagccctcccagtccagctctaccaggcaagtcctcctctcctacttaagcacagaccaagagctgacatgggattaggtgatatgtggggcctggttcctgccattgcagagcatgacagacagggagagggtgtggcttgaaacctgggaaccttgtttctggggatgagcaggatgtaggaagtcaggaaggcagggagcttttctggagtccctctcaaagcagccactccctttactggtctgcaggaccaggcagagtgggaagtgggaggtggctgctcagcactttgctacctgttgtctttctgaactgaagactcagaccatctttgaaagtcctgcggatctagtggcctgcactgggtgtttggaggaagactcctctcgtgaatagtttaaagctagagaagcaagtggttgccattccttgttccctgggactggtaatttaggggacccttaggatctgcacaggtccagaaagaagaggcatcttactgtggttgcttctgtggaagaagaggcatcttaccgtagtggcttccatggctgtgatcttggatgggcggggccagatggggaggagacagcagggatttggcttctttttctccccttcccagacctgtgcggttggagagcttcttatcccagttagcagagaaggtaaaatctgaagttagcagagaaggtagaaatcatttttgatttttttttcatgtctgactttgaattgttgaattcatccaagggtaaatattcctctgtataccacactagccataagcacacagtcacatatactgcacattagatagagcgtgatggtgacttacaggtcctgcttaatggaggtgagcgaggtggttttatgttatttggctaatttgtatttgtttaaaggataactaggctgtttcccttgcccttcattatctttctagttcataacctttttctccaggcacagaccttggctttggttgagtggggagggaggatgtcttgttttctttagtctgccttacagatgctggaggaagctccgttgttactttcaggtccctgaattccccaaaaagcagattttaaaaatcttggccatggattttctaccttgttttggtggaaactgctctattggaagttgcctgactccacccagctcatctgggggctcccagaattttacttgtaacccatcagatttgctcttctcctgcttgtagacactcaggtgcctaacctgggaggttttcatgggaacttcacaaaagacttcagaaaggtggagaaggaattgccgtttatttagtactcagtgtrtgccaggccctgggtgcaaagttgccagtgttactgcatcaaacattctcaccagctccttaagggagcttaaattaacacaattttaatgatgcagaaactgagatctggagctgcgaggaatagagatagcttaagcatgtttattacagaaattctcactgcaaccagttgctggttcttttcttcactcactggcatgtggaaaaagcctgttgataaattgtgataagaacgactgatgtgctggggtgtgccgagttgtctcttctgcacatctctcctctcctacttaaggagaggaggcagctagcctagcctagcctaggattaggctggagcttgcactcgggagccgtatttctgggttcagatcttgacaccacaggccttcttgtgtgacctcagataaattacttaacctctttgtgcttcacaattagtgatgtttgttaaataaattaagcagttgagtacagttctagtgatctcttaccactgaaggggcaaagatttctcctgcatgtgccagcttgatctggcagaggacagggttgtgaggccctctctgtgatacgtgctaggctgctgagtgctaagatgtcactttcctaaaataagtgtcctggatgccgtaggcaagccactcattcctcgctctgccttcctcggagcactgctcatcctctcttcgtatatcaaagcccccacactgaacacgatttccttttgccccgctgtctgatatttaatcccgaatggtgtagggggtgaagagagtggagtgaggcagtagccagcttattacagctycagccttaccagctgcctgtgtggtggccttttagggccattgggccctcctgctctacaggatctctctcccacctgttgcagtaatgagtgaaaccctaaagcctttcactccccggtcagacaagatgctgggaaggcagcgttcctgggagaggcatcaggctgactgatattcacatcaaaggaacgaacaactcctttctttctgagtaggctgttttagagacgacaggatagacataccttgagagtattgagatgacttgggaaaaagaggcatggatagtctggagatacaaagaatacttttttctgattcaggttttatttggggccagcatgcttctgcacactcctgacttcacacagattcaaatacagcttgtccagaacaaagacggtttctactaattttttacattccatttttatgaaacattctcagagttccaaggaaaagagaatcctgttgttctgtgagattacattaagaaccactatattggttatctgattttctttttctttcctttgaagctctacattgatctctggaattaatgtcagtgagcttttgaggtctctaaaatgagaatgggaggcacctggctccttttcaaccccgagaagttgaatgaaattggtgtggggatatctgtggagtcagatttcctttggatttttcatttaaccccttgagccttgagctaaaggcactgattttgttcatgaagggcctgctcccattcttgcgtcccattcttgagccatgctgactggagatgaccggtgacaaccacatccaactgcccacagctgtcttcgggaagctggagaattagaatagtattgtctgctctgaaacagcctggagaattttagagctctctgggagcagggtggggtatgggataagggaagatgtgatgaaagagcagcctttcccagttagaacagatgtaggaagcragcaaccccagaaacatctggaaaactcttaaagtgcaggctagtccctgtgcaccccataaggtcgactgattagaggcagtggaggcagatgtcagggtcagctctctaggatgcccttcataattcctgttttcttccccagggtatgtttgtgctattattaaatgattacacatgcttgttcattccttcctagtgtatactttctagctaatgtcatttsaagctaaaaataagtctggtccttagttagagttcctgagatttttctgcccagccgtctgtctttctcctgagatttgggtcttctcacatcatagtgaagtttatcctcctggtctgtctttgcatagctgtaaatgatgggagattctggatgatgagacaaagttcccagctcactacccagctatgacctgcatagggggacagcagcataggtagtcctgtggcgaagcgttggcctggaggacaggcctaggtgctcactaggtgctcactgcctggtgctttggggcgccatttcccctttcggagaaccagagtcctcttgcatagaatgagatcatggaatagcagtgcattctagaaactgcctgtctccttttttttttttttttttaaaggcaagccctgtcttcaaacaattttgtatggaatctcagtttaagaagatatttactgtccgtggaactgacaaccattgcaccccctcttctcttcatttgctggtgtggttcccaggcatgcctgcagttgagggcaagacagtttctgatctactgccattggaggatctcccaaaccctgtgagctcttgagtgtctgattactgcccagggatgaccattagccttgagttagggagagtatttccacagaggtgagaaggtagttcccatggattcctaaaggtttaggaggaactggcctcaccagatggtgagaattttgctaatgatggctgctaatgagggacacttcccatgttcctggtaataagagttgtggcaattttgtttccttgggaacgtcctaaacaaatgacttacactattctgttagtagtgggaattggaaggcattttcatgacagtgataattatattacaaacatcaacagggagacccatcagataaagtgggataggaaagaacaagacaacacctattgggcattttgaaaagctgataaggtaaatggtcattttaagaaaggtctcaaagactccttcaactagaaaacttcttatgctgaccttgaaattagggcaaactgacaagaacaacttatttgataggaattgctgggttttgcacagtggttctaagtgaggttctcagacttgggttcctgtgattattctcagccaacatgaatttcacgtaatttttaaactttaaaatctgggtgtcttaaagtgttttctatcatttatgaaagtccgttttagaatttttttttttctagtattaagtcagtgtttctccaaccagtgtcctccagaaccctttaagaagacattgtttgggtccttgaaaattatttttcttcaaaaattttctgaactttattcaagtttgagaaatacagactaggagacaggctggggtataatcatgtgtcacatagcattgttttggtcaacagtggaccacatgtatgaggacacatataatcccatacaattataatggagctgaaaacttcctattgcccaatgacatcatagtcytcagaagattgtarcacaacgcattatttgtgtttgtggtgatgctggtgtaaacaaacctactgtgttgtcagtcatataaaagtattacacaattctgttcagcacatgattcttgataataaatgactatgttatagggttatgtatacttttagattgttattttagagtgtactgcttcttctaattaaataaaaagtaacctgtaaaagcagcctcaggcaggtccttcaggaggtatctagaagaaggcgttgttattctgggagatgacagctccatgtgtgttattatggcccctgaagaccttccagtgggacaggatgtagatgtggaagacagtgatgtggatggtcctgaccctgtgtaggcctaggctaatgtatgtgcctgtgtattagtttttaacaaacaaaaaaagaaaaacatatataaaagagcttagaaaataaggatataaagaaagaaaatatttttgtaagctgtacaatgtgtttgtattttaagctaagtattattacaaaagtcaaaaagttaaaaaaaattaaaagtttataaagcaaaaatgccacagtaagctaaggttaacttattaaagaaataaaaatatgcttaaaaaagtaaatttagtgtagcctaagtgcacagtgtttataaagtctatagcagtgtgcagtaatgtcctaggccttcccattcactcaccactcactgacccatccagagcaacttgcagtcctgcgagctccattcatggtaactgccctatacaggtgtacaatttttatcttctgtaccatatttttctatgtttagatagacaaatatttgccattgtcttacagttacctacagtattcagtgtagtcacatgctgtacaggtgtatagtctaggagcaataggccataccagcctaggggtatagtaggcttgatatggttaggctgtgtccccacccaaatctcatcttgaattcccacatgttgtgggaggaacctggtgggaggtaattgaatcatgggggcgggtctttcccatgctgttctcatgatagtgaataagtctcatgagacctaatggtcttatgagggagagtttccttgcacaagctctctttgcctgctgccatccacgtaagatgagacttgctcctccttgccttctgccatgattgtgagacttccccaactgtgtggaactataagtccattaaaccctctttcttttgtaaattgcccagtcttgggtatgtctttatcagcagcatgaaagcagactgatacaaggctctaccatctaggtttgtgtaagtgtactttgtgatgttcacacaatgacaaaattgtctaactatacgtttctcagaacgtgtccctgtcattgacacatgactgtaactaagaccacaggttacatgaattcctttcatatgtgtttggaataacatgtttttttgctttgtctcatttttcagaagggagagaaagtaaagtgaactaatttgcattgtgtatgtgctctgtgtgtgtgtgtgtgtgtggtgtgtgcatgtatgacaggcaatctactgttatgctacagtttacttttgctctcttttctgaataaatgtgcaaaatgtgtatggaacctgttgtgaaggtgctggccacattttctgatgctttaaggacaagtgatccttattctgcttgagaaatcttcacggcctcatttttcactgcatcagataatttaagtctacgttctgggcattcctcatgccgatttcttcttacagatttatcgcactttctatgattcccaacatctcttgaccaggctggtcagacctgtctctcaattgttccacgattcactttgattttatcagccttggacccttgcttcatattagacctcttatttaaaatgtcttaccttccatttatctaaatcccaacttaatgtttggactaagtcatagctcttcagtgaatgggagtgaagctgtacgaaatcattgcattctagccaggtcctccaaaattggatatgtgagaaagagaagctgaaatgcccttctctgtaaggttctcactcatttctgttgtttctttcattttggcttcagggaaggtgtaatttcttttagcattgtgtaggtgaggccagtcactgcaagaaggctttgtaaaataacatgtaactaattgggcttacaaagtggaatgtacctagctcccatcgagtagaagggagggttcccttcatgtgtttctgccactcatgctcccagctcctattctgcttccatctctctccatgaacagtttataggcaggagggcaggacctggagggtaacagaaatcgccctcttacctggctcaggaaaccagcgtcccatctgtgattcagttgccactgtagtgtttatccacttgagggcagatatcaccccatgtgcctgggaagataggtttgcttatgacctcaaaggacaattggagggctctcaaacttgggtacctatggtaattcagatacaacaccaagcatccaacaatcctgtaaggatgttgcatggagattttgaagactgttcatttaaaaactcccccagtcattctcttctctcagctactccatacaatttaatccttaattatattttgtcatgttcccctttttcatacagtagatgctcaataatgatttcagtcatattgtttcttgaaataaattgaaaataccggccaggcgcggtggctcacgcctgtaatcccagcagtttgggaggcctaggcagatggatcatgaggtcaggagatcaagaccatcctggccaaaatgctgaaacctgatctctactaaaaatacaaaaattagccaggcatggtggcatgtacctgcagtctgagctactcaggagactgaggcaggagaatcagttgaatccaggaggtggaggttgcagtgagccaagattatgccactgcactacagcctgggtgacagagcgagactccgtctcaaaaaaaaaaaaaataccctgagagctgggaccatgttgcctatgcagttatccatcagtaaataaacacttggttgattccagtgcaaggaaaaggttgacccagtttgattaaccttctggggtcagcagattacttttgtcccttccaattggtttaattcataatgatttttatttgtatcaggtagataaattataatgttgcatagatggaaaatgctctgttgaatggaaatctgaattttccttataaggcttaacatttatagtcttactgggctgctagatagttattggaaaaaagagaatgacacgttcatgacttagtggggggattgctgatttgactcatttaacaatggggtctgccgatggtgcatacatcacagataggaaaaatactttttcttccaccctctccagaatactttagggtaaggagaaccagagaacatgtgttaaatgaatccaaatcaaacctactagttatacaaatgatttaagcgttattgtggaaatttacataaaactcagactcagcrtaaaacagtacaaacaccaaggccaaatgagttaccacagtaataaagtacacacagggcaacgtgcctgtgatatagggaaggctgtctttaaagtacttctggaatgtcagtttcagaaactgaaaaagatgctagaagtttgattttgtgtgatcaaacatcatttagaagctaaggaacagaaggaatattaaggtacccaaagaatattaaggaacctaggaatgtttgtgtttggggtgattagagcttcttgcaagcttagaagtaggaagctaatgataagggatcataaaaagaacaaaatagattgttttaactctgaaggattgtctttttctttagagaaaattggatcacttataggcagccaatctgtttaataatctgacttttatcatccccaaccaaaacatccagatgcattttgttgccttcccctgtctaatgtgaaatagtggttcagtatactgttcatttttcattaagaaattgtcagctgctgttgacaaacaggtaatgagtttgacacaggatcgatgtgctgtcagtcttgagcacaggcatgtgtttatcttgtaaggtggctttttgcatgggcttaaagagttgtttttgactccagggaacctatgaataaacttcattctaataacggttttacaagttttgtcaagtttttaagagagatgatcagttttttgaaccgttttactttttagagggagtttggagttgagaattaaactttgatacttcctgttgtccatcccctagccaacacacacattattataataacatttaccgagtggcttttttctgtatgttaacatttacattgatgttcccatagattataattgagaatttttaggaaggttcttcaaaatcgtttgttgcttaactctgataatttttcaatttgggcagctggtttgattttgcctaaaacaaaaacctcatcatttaaatacagttactttaaacaattaatgtaacaataaacaaaattcgggaactgtaacaggaaaaaaaatcacccatgatcttattatcagtaaagcactgtcatcatttctatatttttcattctctttttttcaaggatcatgcttagttttgcatacacacatggaagggcaggctgtagcaggaagagagacgggatcactcgcccctttctctttggtggttgaggctttctagctgagtgtagctggctctccgaaaggccctgtgtcatgctacagagactaggtccattccccagtacctctccagcctagtctctgaggagccatccctgtcatctgggaggcctctgccttccttctctggtacatggaagcagcagaaggaacasgtgcccttctgtcttctcttgagaagtcctcccctcccttcctgtaaggtggcaggcctcaacatttttggcaccagagactagtttcatggaagacaatttttccacagatggggtggggtggggatggtttgcaggatgattcaagtgcattacatttattgtgccctttattcctattattacattgtaatatataatgaaacaaatatataactcaccataatgcagaatcagtgggagccctgagctggttttcctgcaactagacggtcccatcttggggtgataggagacagtgacagatcatcagggattagattctcattaggagcgtgcaacctagatcccccgcatacacagttcacaatagggtgtgcactcctatgagaatctgacactgctgctgatctgacaggaggtggagctcaggcagtaatgctcgcgagccgccactcatttcctgctgtgccgctaggttcctgacaggccgtgactggtagcagtccatggcctgtgggttgtggacccctgatttaagggacatcaggaaagtccagctgggttcctgttaggatgctggttttttagacagggtctcactctgttgccaaggctggagtgtggtggtgccatcactgctcactgcggccttgacctcttggtcaaggctgtgatcttcctgcctcagcctcctgagtacatggactacaggcatagtgccaccacaccctgctaatttttaaaatttttgttgagttgggggtctcacagtgttgcccttggggtcttgaacttctgggcccaaggtatgctcctgcctcagcctcccagagtgcacccaaacgtggtgtttcagacatgccacaatgctccactgcagatctcactccacacctgaccaggggagcagcccaaggtcttgggatcactcacccctttctctttggtggttgtggctctctagctgagtgttgctggttctcagaaaggcccagtgttgtgcggcagagactgggtccattccccactaccagcccgggcacccctcactcgtgggcccgcctctttcctctttgtctcccatccctggcttggtttcctggaagaatgccttgagagaagctgcagccagtttgtgctggtgaggaaagcatagttttcagaagcttgtcctctggtccccatcctgcctgtcttcccacttggggtgggaggcctggggagatctgcctgttctcactcgcatggccaagctgatcctggtgtctgttgtttgtctggcctgctctcctggccagcgcccaggatgtgcttccttagtgcttccacatgtgagtggctgggctggggtgggttagtcgaggttgttctcactgtcagcacctctctgatcaaacagaagtacagagagggaggttctgcattcacaaaaaatcagaagggtattaaacgtaatatgtttgagtagatgccttagaaatagaattcacagcagaatgccctctttccagtagagaataattcaggaccccatactgtagcatggtggagcatgtttggaagtcacccatccccattatcagtggaagtgccgagatcattattctgagcacaggatctttttctaagaggattttatggttttaaagggagtttggaaaaggsacatttgggaagcttgaagtgatgggacagaaatatcgatttgtaggttgaataattagactcctcctcgatgttcaggtcttgctgcagtgtcccctgcttgatgattttctagtggctgcaatatatgaccattatacattgcagaagttatagttatttgtttaaacacctttctcctctgttaatctgtaagctctttaaaggcataacctcccctttttcttttatttccctggagcaactattatacatacaataaagatttattgaaatgartcagatagtgtcttcttatttttgggaaaaaacatagttttccagagtaaatttagaagttatttgcttaattgaaaaaatataatccttaatcaaaaaacttaattttaaagagggtttgcaccaagcttaaacactggtgtgtgtgtgtaaatatgcatttttaaatgtaatatatgtgtttctttctcctttccgctggtataagcatttcgtgagaagaggataatcatcaaccgcttgagttaatctgggggaatgtctgggaagtgggaagttgaggaatgccgcattgttgaatacattgagagcatttctggtttcaatttggtttacctactcttggtctgggagatctggaatgctgccctggactttcggttttgtgtgaattggctctgaggaaaaggattgctagaattagctgttggaatgaggagcggcagagactgggctcttgagaagcgagtggactggaatctgttctctgagatgttgccttgaatctgacttgttgatgacagacccatattggaaataytattccactgttaataagaacattttattttcacatgcaacttgttaaatatgtagccaaaaatcctgaaacaaaacaaaccccctctccactcaaaaaacttttctggaagtggttacttaatagtgcacatttcaatagaccgttgaatgaaacactaagataaagaaaatgttccctgagggaagagtcctgagttaatggcttagaaaggtgttgtaatcaactaagttttcatgcctctttcttcttctcattactgccatttcccttattctgatttactgattatttttttgaataatacattttaaaagagtatttgtttctctcactttaactcagatttatcacagtttgaaacttctatttagtatagtaataaaattagttttagtaggagtagtaaattgaggatgtgacaagtgaataaattactgaaggctcaaaacaaaaagcaatacaaaaaacctgaaaggaaaaaaacccaaaaataaatccccaaacctgtttgcccacatctactatctttcagaaccaagtaagaatctcagttctgcagcacctttcctcgttcttcttttcatagtttgtaccctttgatttgtgatgccttttacttcaccccaaacccccgtgacatttaagatgcgtgctatacaaaatacggttcctggctaaccagcwccataacscttgttaagctttttctattctgcagaggcgatagctctgaaatatagaagtgattgcattaaatccttggctggcaattttgtgtgggattgggtattgaaatgcagcaaagcaaataatgaaggcatatgtttacctataattcttttttaccttgggagaaggattaaataggaacagtttggttgttgtcaaattcttaacagttgctttcaagcatgaaacagtccccgggctctcggaggatttacttagcagtttgaatagagaggtctttactgctaatggaactgagatggcaggcttaagcaatggggtgctttatagcctctttagccacttgagaagatgtaacatcaaatagctgaaaccatcctgatctccattggtgtttaggaagttgtgcaaagattggtgaataaataattcagggttgtatgaatgtctggatgccaggaatgttgagagtatctaaaagcttgattcacagaggatttagttctgggagaaactctggagcccctccttgagcttggcaccagggaacatttacagatgatgacattttctaagaaagaaagaactttcacttgggattgactgggctttgtaaagcaacatttcactggggactccagtcccggaaaagtcttatttgtaaaataaagaatattttcagtacagatggttggcagttgctgctgtgtgtgtgtgaatgtgtgtgtgtttaaaatacaggatggtgatgattatttagggtcttaaataaccatttaagttctgtactatttaatggttaagctttaagaaatcacttgttgaagacacaggggagaagtagtcacagtttgtctgttgaagcttctgcttcacgctctcgtcatctgtttcagaccttagtaaagacgtcccgaatgtgttgtccaatgaacaggtgggcagcaggtgttggggacccactggatatatgaatattcacaaatattcggactctcctcctgcgcatagagtagatagcagttccctgttcatttggacataggcgtgaccatatgacttgctttggccaattaaatgtcacttctgagcagaagcaggaaagctcgtgcttgtttcaccacatcctgtgccatggaaacttgyagttgattcttcagccccagggtgaggatgacttggaaaagagctcccagctgatggccagtgggcatggagggtgcacaagaagtgatatgttccttgatattttgtgattgttactgcagcatgacttagcctgccccgatgcatacaacctataaagtactagatttttctctaggagaaaaccactcaggcggtccatgggtgtttccctaccttaggctgaatagagaacttcccatggtgatgtggtggacaggagttagggcagagaaaccgctggctgctacacaggaaccactgtaccaggcattggcctttctcctttgtttcttgttgtctgtttcccataggtttctacaacattctttctcttcctgcttctacccgctaagtctgtttctatcctttgcatggtatcttggtgggaattctcaattttatgctaaccaaacatggaaagcagcttctgttcttccattacatgactcagaatgcctggacccccgacccctcttctctgccacagatgaggacaactctgtgtcctagagtgggtgaaagtgcttgtaattgccaagtgagggagattcacatgctttcatcaagccagagctgggcggctggggaatcggattctagacctattatccttaggtgcattgcagtgcttgagagaatctgcttttcacaaatgttttccactcttcacaaaactcttgggaattggaaatataatgcacactttatagctgggaagttgaggctcacagaaggtaagtactgtgctcagatcatcacatggacatgatatcactgaagcagctccaagaagtctctcattccaagatgtacactctttctactgctgtattatacacttctgagtgtgattaaataggcatagttgaaagaggcagtaatatttgaacctatcaaaagccagttcaaatagatcataacagtaatacagcaacaataaaataataataggctgggtgcagtggctcacacctataaccccagtgatttgggaggctcaggaggattgcttgaggccaggagtttgagaccagtcrgcaacctagtgagaccccgtgtctactaagtaaataaataaataaataaacaaaactttataaaataatagcagctaaaacttacgcagtgcttattgtatgctgcaatattctaaggcctttaaatttattaatgcatttaatcctcataacactgtgagtaaatattcatatgaggcagtagaggcacagagaggttaagaaacttgcccaaggtcacatagctaataattggtaaactgggatttgaacccagactctagaatccttgatctaaagaacaaatgtttgaaactctgttaaattaagactaaaagagtattttttaaagaagagcagttttatgttcacagcagatttgagaaggtgctagagttcccatatagccctgcccccacacatgcatagccccccattatcaacagctcccacagagtggtgcattgttaaagctgatgaacccacattgacatgccgttatcacccagagccacagtttacattagtgggccacatttgatgttgaacattatgtgggtttggacaaatatgtaatggcatatatctgccattatagtatcctacagggtatttttactgccctaaaaatcctctgtgctccatctatacatccatcacctgattccaacccctgacaacgactgatctttttgctttctccatagttttgccctttccagaatgtcgtatagttggaatcccaaaatacgtagctttttcagattgtcttctttcacttaataatatgcatttaaattccctccatgtctttttgtggcttgatagctcatttctatttagtgcctaataatactctcatcatctgtatgtaccacagtttatccattcacctactgaaggatatcttggttgcttccaatttggcaaattctgtataaagctgccataaacatccatgtacaggtttttgtgtggacataagttttcaactccattggataactatcaagaactgtgattgctggatcatatggtaagaatgtggttaattttgtaaaaacctgcccaactgtcttctaagtggctagaccatttctcattccagtgatgaatgagggttcctgctgctccatatcctagccagaatttggtggtgtcagtgttcgagattttgaccattctaatagatgtgtgagaagaatattctaaaaattgaatttttataaataataacatggcctgcaatttctgaaatacgtagtgtatttgttctttttttttggtttaagaatcctaaaatatgtactgtgtatatgcattattcctttatcgatcaagcttctagctacttcctctaccctctcacaccctccttaccatagcagccatggttcatggtcaggcctctcatatgctgctatgagaggaattgatactgggctcccaggggtctatactgggttttctgtggtctgtgctggactcccttatttacctgttttgtcctttcaaaaaggctattaacagggctcttgtctgtatgatgtaaacaattagaaggaaggacaccctagataaataccttgggatggtgctgaaatttgttagtcatcaagagatgctgtcctgtggaaccctagggagtcagggtggttacagaatggcaagccccaagtcaggcctgctgccctcctgcagggctggagaggacagtgagatgggcataggagaaaatgacgtccctgctgaagtcagtttcagcatcaggcagcaggtacatggtgctgctaggggagtaggggaaggtagattcttgtatttttcttttaatctgagagttgagagtgaaatacttcactaggcccagctttgtgtatgtgtctgttgaggagagagaaagagaataaaaattgggcttgttgaaacaagccaaagttcagccaagttctcatctgaacctctaatccctccaagattttttttccaggcataagaagaaaaatcattttctaaaactttccatttctgatttttctgtgattctgggcagtcaaacttgtgtaaaatttttatgatacctttttattttataaattctcagcatgttaaacttgcttattttagtttgaatttttggaaattataatttttctattactcttcttggcataaggtaatttcttgttggggtgatattttacaatttagttacttaaaacgattttgcttttagtgtaaatcttacctttttttggaaaaatatgtattgggtgtcagaatcactttgtttttaaccctttttctgattatgagtctaatattgttattgtaggaaaaactaggaaataccagaaagtattaaaaggaagataaaacatactacctactcaaagtagcactactaacaatttgttgtatttttscagatttccatgcacgtatatatgtattatacatgtgtacttactgttgtgtataatagtgaatacagctatataggcagtttttacagcctgcctgtttcagtggtcgagatcatcatgatttttccatgcttkgaaatagtcttagaaaatatgatttttaatagctgcatgtgactttaatactattccataatttatatattattttttgggttgttggtatttaggctcctaacagtttttcattattaataatgttaccttgagtgtctttgcttgcattttttatgaggcttaacagttcaggtaagaggcctagaatattaaaaataactcttattcacaagctcctcccatgtgacaggtgtttgacactttacttacccccagaacaagcatgtgaggtaggtggcattgttcctcctaaaaaaacaaactggtggctgcaagctggtcagccatggaggtggacacaggactttctggaccaaccccagctctttcttgctgcactgttctgccttgggcacacttggagtgaactgtgagaccaaattatgagagaaggactatagaaaatcatgcagggggtgggggtaactattatgatgaaacatactggccagtactggtggatctgaaactggatcaggcggtgtatactggaaactattatacagatcctctttcccctgcctctgggattttacattttaaaaataaggtctcctgaagcaaagtgatttgcctgaggccatacaactaactatttatagcggtgagtgggaccttaactcccagcaactgcttttcccagcaactgctcttccatgttctttccactgtgcttgactctacaggcttcccaaaggatgaaggctagaggtctgaactctgtattcataataaggtcagagtacatccttaaagggacatctcccctagttatctagtttgaaatcagttagcctctactgaactatgaggatggcagtactgtagactgactgactggattttgatcctagttctacctttttcttgtcgtgtatcctgggcaagtttcttaacctctttgtgcctcagattctgcttttttttttgggacagggtatcactctgttgtccaggctggagtgcagtggygtcatcatggcttactgcagccttgacttcctgggttcaagtgatccttctcccaagtagctgggactgtaggtgcgtgctgccacattcagctaatttttgtatttctgggtagagatggggttttgctaygttgctcaggctgatcttgaattcctgagctcaagcaatcagcccaccttggcctaccaaagtgmtgggattacaggcgtgagctaccgcactcgccatcagattctgcttttattaaatagagacagcagtagtatctactgcatgagattgttgcgaaggctgcatgaatgcactgtgcagagctcctagaacagtgctgggcgtgtagcaagcctggtgtaggtgtagtgagcctggtgtgtgtgtggcgagcctaatgtgtgtatcagctgctgctgctgagtaaccaggcacattccctctgctgttcctccattagctactattttcaaggaactcaaaatgatcactttttgcctctaacagaatttacagaaactctacaagagcttgaaatgcacctatagtggtcagggagcgtatatatttagggagagtaataagataaaatctttcatgaaaaaagcttttagaagactaagaaaacataaaggtctttttaagcaggcatcagaatgtcatctcgaatctgtttcctttgtttcttgataggaaagtagttaaaacaacctaatagcttatcaataaatcagaagtttccagatttcctgatttgcttttgcttgctagtaattttcccgactcttatcaaattggatacaaatagatgtttttaaaagtcaagttgcccacactatttgattctgtttgctatttttggcttaaaaatgaagaagaaatatggcctaattcttgccctgtggtgaaattatattgcaaggtaagagaatagaaaataaagcttttcattatcacctctccatgacctcttgaatgaaaaggttgggagtttgagaggttctttttttttgagacagagtctcgctctgtcacccagactggagtgcagtggcgtgatctcggctcactgcaacctccgcctcacgggtccaagcgattctcctgcctcagcctcctgagtagctgggattacaggcacctgccatgatgcccggttaatttttgtatttttaataaagactgggttttgccatgttggccaggctggtcttgaactcctgatgtcaggtgatccgcccgcctcggcctcccacagtgctgggattacaggcgtgagcaacagcgcctggccaagggggtttgttcatcaagatagacttcctctgtctctatcaataactggcaaagttgcagtgagaccagttactagtggtcagtgtgtgacattggggcccatgagcctgggtttgaaacccaggtcctcggcatccagctgaaacagccgtttcagcctctcagcttcattttcctgtaatatagagaaaatacttcctactgtgaggctaaaatgccttaacattcataaaagcatctaatgctaggctcttgtaattttagcaccttttcctctgatgacattcactgggaaaaggaaaggctctgtagccccgtcttcagaactaaattctccaaagcaggacttcattctaggcttgcttttaaacaagattatttccatataccatccaatcaggtaatatgacataggaaatgcccttccctctgtgagacatgcactcgcgtttggcaaagactgtggtcaccaccttcatttaaaagggtttaatgatctttggactttagcagactccatagagtacagccctgatggacagagtttaggcagagagaatattttccatttcataatctcatacacagggacctaaattccactatcagggacttctttaatgactccaactgtcagcctggacatgagtgacctgaagaacctgtatggagagtggaaggggcatacagatgacttctgctggtatgaccctctcccctctcccagccacacagctggtggcttcacaaagagctaggttagcagtgaggttgtcctgtgtacaatttcagtgccccttgctcagggtctaagcctgacccatgttgctgcagattgtacactggggttatctgggttatttatttatttttagagacaggatctcactctgtcatccaggctggagtgcagtggtgcaatagctcactgtaaccttgaactccagggctcaagtaatccccccaatttggcctcctgactagctgggactgctcctgagtatctggaactcctgtgtaaacattttaaaaatttaaaatttttgtagacacaaggtctcgctctgttgctggggctggagtcgggagatttttgacacaattccgtggtttatccaatccatgcctgcacctgggagtgcatcacactcagctcactctcccctcggcactatccccctctgcaggtggcttagtgtccttcctccaagcagagggacttccctggtctccttcctcttctcgaggttctgggatgactcacactgaaatattggtggaatgagaatcccctgtggaagttgttgtttccatccctgccatttctactcacctcctgacctcactgacttgcacaaccagccaccctgtcattactctgggtgggacaatttcccttttcaatttttggttatcagatgttaccatccttttgggcctccggatatgggccttttcctttgcagggttatagctgtctccctcaaaggcttggtttagtccagcagccaggcggggaagcattttattcctctctgtcctgaggcatatgtcctgaaaccattctgttcttggcctcctcagcccttgtatgagatcctgtcttcccagagaactggcccttcccagtgaccacccatctttggggtaaaggtctttatcctcatgtttcaggacctgactctgggccttagggtacatggaaggagggagatttggggacacagaatgcccagtaacctgcggtgaggctcggttcattctaggaagtatttaggaagtattttgcaggccttgtgctaagggaatgtgaagatgagaaaattcggcgggcaccagaggcatgggagttgagtacttggctttgccaatgttaaatgcctccttcaacatttcagacagggaatttttgtagtggagagtagagctgaactttaactcggtgatttttcctgacagaaggtcctctctaaggacagcaaggaaatcaacagtagcagttagttaggaaatggggtgttgtgcggtgctacagtgactagagtcagaaggagttccattgattccaaataagaggccctgcacaaatggagattctgatgtatgcagctctctacctgtrtctatttgaaaacaaaaagccaccttattttgtctaaaataatttgaagaatttttagatggccacatgacaaagataccatttcaataagtaatataaaaaatatgtggtgtgaacctgggaggcggagcttgcagtgagccgagattgcaccactgaactccaacctgggtgacaagagtgagactccatcacacacacacacaaacacacatgcacgcacacacacacaggatatgtattctgtgaaccactattcatttctgtataccagactgaatttttaaaagcatttgaagcattcactatttttcacattaatatcaaagcagtaaaataatccagaaacaaaaaaagataagtagcttaatgattctacttaaaattaatgcaactaatgtatttctgttattccctagtgtattgttgttgcaaagtagttactgtctttcaaatgaaagtttaaaacgataactttctgaaaattgcagctatcatacaaaaacgtgattgtaaatcgtttgtcttttgccatttttcttaaaagaattagatatttaaaagatcatataatctgttaaaaccattagttggcattttaagagtcacttcaagaatgtgctttaatttaaaggaaaactaagcttgaattcattttcatcttttttttactatattgaaaattttaacatttcaattctagttttgtccatgactgttaataattcagtcattcagcagataattgagggcccaccctgtcaggcactgtcctaaatgctgctgctgcccaacaaaatagacccaaaatgctggcttcatggagctcacattccatttgtgtacatttctatggaacaggcactgtgtactttccgtgcatgcttgagcaattttaattcttctatcagcccaaagaaggcactattactatcccagtttaacaatgaggaagctgaggttggcarggttcgcagtttccagctcatctccatctacgtgatgctggtttcatgaccactgtgcagtcacttgctttagagtggtttgaaccattgagttagcttcactgagaagtatcatggaaccacttacactgatattacgaagtatgcttcaaaatgatggtacactcatggaagcagcctcagaggaaagccattaagatggcgggggtgccaatcatgtcatatgagggcaattgtaagatattattgaactaagatcaatgggtacagggtttgggaggaaggattcaggtcaatgtagggaagaaccatctaacctgtccacagaagggatggattgcctaattaaatgccgagattagagaatttagcctcgtggatgtggtcaagaggattcaagcattaggttgatgatcatttagatcagcttcccacacctgctcatcagaatgatccagccacttgttgaaaggatgtgttctggttaccctgagatgttttcattcattagatttagggtggggcctgaacatctgaatttttaatcaacacaataggggacctgttgctgggtagagggtggtggggtataacagaggtcacaaatgtacaaaagccctttttggaggagcatgtatgaaatgttttaggaactgaaaggtcagctttgtggttgtactcaagagagtgaagggcaagttgtattagaaaaaagtagacatataggtgtgagccagaaattggaggttttccagaaccacattaaagattttaagcacaactgaaaccattttagcctagagtaacatagggtaaccagattttgtgtgtgtgtagtgtgtgtgtgtgaatgtgcagacccacacactcaaaatacrcatcatatttttaaagatctctcagactgtgaagagaatggacttaaaaatgttcatggaggaggtagagtgggtggcagtggactggttaatagactattgaagtattccaggtgaatgacaaggggacatgaggaggtttttttgggagctaaaatcagctggcctggatggtagaccagatcatggggataagggtaagagggtattcagggtggagagggatgccatttactcacccagggaataggtttgtgggaatgttttgaacgaatggaaattgaggtgcctgagatggccactctgacatgtctaatgggtggttgggtatgtggggttagagctcagaaggagaggtcagatggttgaagccaaaggggtggatgaaattgtcgagggagcaggaagagtgttagaagagggctccagacatctaatgtctggtggtggagaggaggaaaaccaggattcggccgtcaccagggaagcccctgaagagggaggagggtgtttcccaaaggtgatatagacaagagagcaggagagatgagacctgagaagaacagccttggattccttggcctggatgtccctgtgacttcagcaagagccgtttaggtgccacactggaggctgcagggagttggggtgaggaccagagagagtgattatggagactgtctcctgagagatgtggttatgaggaggagcagagacctaggacagtcacttacgcgcaacgtggaagggaggtttttaaacatttttaaaagatggagtagccttttgggctattttgctggtttattttagaattaaaagtgggggaattaaagaaaaaagttttgagtaatgcttttaaagtttcatctttgttattttaaaatgttttctatcatgaactctgaagaaatctttgagaggatgatggatttacattgtcagtctcttatacaagtgagcccttgtgaagtaattttttcaaaactaaagctttgtttttctctccttgagataagataaacacagacaccattaatagcacattttgccttgttatctatgaagggggatggttgcaggcatatagtgtagtgtcacgtgagccagtggtaatttacatggggacccttaggttgggttggcttatgtgccatgtgaaagtgagagcctgtgcccrggatctgatttcctctttaattgagtatcaaattaaattcagagatcccggggactaccggccagaaacattttccctcatcctgatttgcttttctgttctacacttctgtgtcctgttttatttaaaacaaatgtaagactttaattaagaaggttttaaagtcatgagattacaaagtaatcttgaatccaatcctctgtaattttaaccaaatcactcagtatctttaagctcaaaatgtcctgtcagctttaaattgraactgaatcccactgagaaaatattatgcagtctcatcaaaacctgtgctaatttcttttttgtttttacccatcctttcttaaagaatcaataagcttgcttttctataatagtgattctcagtgttgataactgtgataagatatatttctttccattaactttgctgtaataacacatttacgttcagaactacaaggctgttttttttttttttgtaatttcacgatatgccgggggattaattggtgggtgctgtgctcttgaggattaaagagtccaatttgggagatagataattgtctagagcaaggttgtccagcccgcggcccaggatggctttgaatgtggcccaacacaaatttgtaaaatttcttaaaacattatgattttttttgcaatttttaagaagttcatcagctattgttagtgttggtatgttttatgtgtggcccaagacaattattcttcttccagtgtggcccaggaaagccaaaagaccgggcacccctggtctagagatacagactatttcccagatagacgggtaggttccctgttactgccctctctcttgagtctggggtatttttgcaattattctagcactacagatctgtcaaggataataatgcatagttattaacactaagtatggatgttatgaaatttgattgtcaatatatcctgtgctgattgtactcattcaagttaaaatcacagggtgcagatatataaaaatctcaaatgctagtttatcactttacagatagaactgtgatatagtgttctatgctaggcacgttgtgctcagaactaaatagcctaagtaggaagccaagttagaaggttggtccagtatggaatcagcacaaggggagttgatcggatgatgtcagaggccaattgtcatgaagctgtttgcctagcatatccatttcactgtagtgacatacctatgatgagaaccagaccatggtgtttttctggatcaatggctgtgctgtgtttctagcagtgctctactctagacattttatatgtaaagaaatgatgttatatgctcattttagagaagaggaaagtgaggctcagagatgttgcgtaattggcctacaagttgcacagatagtaagggtaaaattagaattggaacttgcgtttaattccacagtctgtgtttctactctttttgcttcattgctaagatttgggcaatccataggtcttcagtgatgcaaatcacctccaagaaaccccagtgccttagcacttggtgtcgtttccatgaacagagcttttggtttcctttgctcagacactgtccaagttggggcggctgaaaaaggctccctgagctggccacatctgttttaattagggatgtgtaaaattccagccatcaactgtgccagaagtctggataggctgcatgttacagctgataaatgatctaaggcaaattatctggatttagggatggtatttgggatgaaataatggagagttagaatggtctctcagcaaagctacgtgctgtttactgtaggaattagcatgcctgattagtacagctctgagaagggatgaaaatgtctaaaaaaattcagcaattgcctcagtgccctaaatagtcttatgtcagcaattagcagtaacagtctttcattaatccatcagatttctgatgctgcacatcctaatgcaggagataatagagaatcctcaggattagccactgatgcatcacaccacagtatgtcattacagcagcagtgttgagacagcatattgaagcagaaaaacggtagagcaacaattctctgaaagcaggaaagtgctccttttcttcattcatttcagagtgccatgtgcaatgagccatgaccaggcagcagtctgtatcaccaactctttggaggtgtgtaagtcggctttttagttgtattaatgagatgttgcaaaaataagagagtccaaggaaagaaacatattgctggtaaattcaaaggggttcagattttgcaaccattccttgatgaaatggactctctttcatgtattctgtggtcgtgttacctaatcttaggaggagtcaccatgtttttgctcttccccaaattcatctttggatggctgtgtctcagaatcattcagcaaatatttcacatcctttctggtttcttcaagtctccaaatgccttcccttcccctcattcctggcagggagtcttgccttgtacttgacttccatcttcttagcatcatgtgaactctcccaccttcccttcactcctcttggaatccccatgttgtcacctgtgtgtgtagtgtgtggttgtcacactttgacagatctaatttcaaatctgacctgctctctctatctggcagagtgaccaggcactactcacttggaacctttgatcccctcctttctttccaaatgctcttcctgcatcctccgcatcgcaggaaaggacagcatcttttgtctggttctcaagctgagaaacttggagtcatcctgattcctgtttctctcatgcctacattcagccagtcagcagatcctgttgattctaccttcacagtatttccaaccaccatcccggccctcctgcaggtctttgctggcgtgattcttccctaggactttccccttttcagcattgccccataatggtctagtctgaccattccaaaatatgaatctgatcacagagcctccaaagtcttccatttttcacctgggaaaacacagaatcttttccaaggcccgctgggtatggtgtgatttgcttctagcacttctctttgttcatctcctacagcttcatcccatctcctgccatgggccctgatgctcctcaaacactcaagcatatgtcctccttgtagctcctttctgttttttcttgttgctgtttttgttttagttggctgtatcctccgtgagaatgttcattccataaagaacaggattttttttttcccattttgttcactgccatctccagcctctcgattcccattgtactgttgcctctcttcaatttgagaaatgcagacctatagaatgaagttcaggctctttatcatagtatttggtcttctccacaatgcccagttccctgtctttgggccattactgtttgtatactcacaggaaccctagctacacccagttataccatggctatgtctttgtccccatggctgtgaaggtaggacatgctgaaaagctctttcctcatttttacttgttaaaggtctattccttatctttaatgcccaaatggattgaacaatattttagatttctcccaataaacatttatcctcctttcctctgaaatttgctgccacttgtatagcatttatcacatttcgcctttgtaagttatttgtgaacatctttctcttttgttattcttgtaraatccttgacgatggatttcttttcatttcagatctattgttgcatccctagttatcaccttttacacagtgtttagccaacttatttacaaatagaaacagccttaagttcatatttcaaatgatctcaattagtgtagaaagcttttattatttcctcttgtgtgaattatttacatgaacaagaaataacatgcatatgacaacaaattaggatatgttattttcatattaaatgtccctaagataataagcaatgaattattaatgtatcacacaggcrtatcttttattttattttttgttttttcaaatgtaaaaacaaaactaaatttgtcctaccagaagctcatagggtatgtttaggctttcagggaaaataattatttttacttagagatcagtagctaaatataaaaaagaacttaaaatttgcattgtgccccccaaaattatgccatgtatttggaatgtgtatttcatatatgttggagtttaaaatatttttccagcagtatagaaaaacagaagaaaatggacttacatttattgttaaagcaacgtgtattttatatttttatatttaaaatgcttttgattataatagctaaggcaattttataatgcagggcccaagtctcatttcctttctgctcttccaccaggtaagtagtacttcttgatttaatgcactgatattttstataaagtgcttagcatagtactatgtgcttaataggtagttagcacccaataaatattagcttctattattcataaagaagtgaccttctcttttcagagtccttcttggcctgtcatttatcatattattgccttgtattatttttatgtcttttccagctaagtgtcctttaatattgtagataattttgtacattgtaaaggattaataaattatttatccactgaataaataatgaacttgtgaacattcttttaaaatttaagtagctctgaagtttgctcatattgagcccaaacatggcggaaacttctgagcatagacaagttaatgccataaataatcccagaaaagccactggacacagaacgagtctctggggatgaaccagaagtcacatttgcctgcctacattttccttgcggaggcagttctactaaattaacaggggatatattagcatgttcagagacctctaaggtacagtaaaatccatagaatgcccacttccactacatttgatagagttacccattgggttaagattagttactcagtttatttatgttgtaaatgacttatttggccatttgtttgggaaaggtaggaagagcagtggagagaatgagagactgcagggcagacaaacgcttctgttttctgactgtgcactcacatgagagaaagagagcctttcaaaaagtatttgcttgggtgcttcacatggaagatgtgagctgctgaactctgggagctggcagccagcctgaatatgtcctttaaagtgtacctacctgttaaccactgcagtgcttggaatctagtaggcattcaaggaaacttggatgtatagatgacaaactggaagtgacaatgttccaggtagaggagatagcttgctttttatggatggcttagttgcaggcctccattgggttctcccaaggctcagtgttttgcctggaagttaagccattttcagatctatgagtgcataggtaatgtaaccattacattattattgttctatttcatttacttccaagtaaaccccagtcttccttgtcatgattatattgattgtattcattcccacaatgattcaaaaatactgtgtgtctcagaattgcatggccctccattggacaagtggggctaaaatgtaagcaaggtgggcttcctagagaagcctacagcctaagggggagatgagacctgcttacayggctgtcagtacaggacrgaggaggcgcgtgctacacagtaaaggacttcagaggagggaaatagtctgtacagtctgsaggatgccaaagcacttcagagaagaagttgcattttaagcaagactttgaaggagatgttggatttaaacaaagggactgggttggaggtttagagtgaggacattgaagagaaagcaacaggcatagtaattggtaactttacagtcatatcaattaatttatgttaattaaaagtgtaattcaggctgggtgtgatggctcactcctgtaatcccagaactttgggaggcctaggctggcagatgacatgaggccaggagtttgagaccagcttggccaacatggtgaaaccccatctctactaaaaatgcaaaaattaaccaggcaaggtggtgcatgtctgtaatcccagctacttgggaggctgaggcacaagaatcacttgaacccaggaggtggaggttgcagtgagctgagactgcaccactgcactttagcctgggtgacagagcgagaccctgactcaaaaaaaaaaaaaaaaaaacagtgtaattcatttgcacatgtgtatctggctaagtaaaatgttgtatattgtcaagtttaagataaattttatttccctttatatcctgtaggacatcacaataaaattttgtttggtcaggcttttcttatactgttttatttcttttaagcattgggattcttcatactcaagataaaaaaggaagtcataattgcatgttatgatattctttgaagttatgttggacagcgtccacagtagaaaaggttaagttcatttcttaatgtgtacacactgcctcttacccactagcattggggccacctcattcatttgtttgctcattcaacaaatatttattaggcatctactgtgtgccaggcagtgtctagtgtctttcaattgtgtttgcattcctcatggtatgttttatattctttttctttcttctattctatgaacgtttctttgggggatatagtaggttcttaataatcattgaattaatgcacattgaaaaatctcacaaaggaattcaggcatgaataagcaagatggacttgttgaaagttccactgcagttttggacttgagtacaaatattgaatactatgtttcatagggtttcattagaacagaatgcgtttacaacttttgaaaattttctggtgcttttccttaatttaacaaataatcccacacatgaatcacatcactgttcaaaaatgtaactttgtattttgactaaccttacctaatggggttttggtattaatttaagcatgaagaactattcttggcttttgccaggaaacaggtagttaaagttctctatacttttattaatcataacatttctttaggccatttcagctcttatatgacttgagggtgaatgaaaaaccattcagttaaccaaacagagaaaactgaagactgattagttgaagtctcacagagtatatgccccttctactctaccctaaacactgagatagtcacatttcctagaaagacccagcgaaaccagattagtagaaagaggtccagaataaagtatctgagaaagcattatatctgtaagaggagagtgttttacagaagatgaagactaataatttcaacttcatgtgataaatccagtttgtttcatttttaaatttatgcttcctaataaagtaatttattctagggctcaaggttttataaatggagaaagacagtgcatatgattaagatttcaaactctgtcatgaaaagaattatccatgtttctgcctgccccatgttgtataaatttctctgtgacttataatttcttagacatatttatctaatgatgtgtgtttgaaagcatccacattttgtgtctgccctagttttttaatgattttaagtgcatttttaatggttgaaactgttatgtagaccatcttctgaggcaaaawcatgaagtactacatcacaatattaagttcttcaaattagaattacagttttagtgcatttgttatttaagtattattaggttagttcttatgctaattttagatttattaacagataggctggagcctgccaattaatgctttttactcttgattcagcaataatttgggtagtcagaaatgcagatgcatttcttatggtcttttagaaaattattttcttttgatttaattacttggtgcaggacatatttcattacgacacttctaaatccaattaaatatttttctacaggcaacaattattctaaactcttttcctcacagtggaaaagttgatcatcttgaataatcttaaccatgtttatttctccaaaactgtagtgttttaccttgtaaattttcttgttttccaggtgaatttaaactagatatctcatttccatttttcagcattttctccaatttgattgacttgtactaattgctctgttgcccaggctggagtgcagtggggcgatctccactcactgcaagctccacctccagggttcacgccattctcctgcctcagcctcccgagtacctggggctacagatgcctgccaccacacctggctaactttatttttagtagagatggggtttcaccgtgttagccagaatcgtctcgatctcctgacctcgtgatccgcctgccttggcctcccaaagtgctgggattacaggcgtgagccaccgcacccagcctgacttgtattattctatatgcttttttttttttgagatgaagtctcgctcttgtccaccaggctggagtgcgatggcgtgatcttggctcactgtaacctctgcctcttgagtttaagtgattctcctgcctcagcctcctgagtagctgggattacaggcacctgccaccacgcctggctgatttttgtatttttagtagagatggggtttcaccgtgttggytgggctggtctggtctcgaactcctgacctcaggtgacccacccgccttggcctcccaaagtgctgggattacaggcttgagccaccgctctcggcctctatatgcttttatattcatattccacatgctgtttacatttatatggtgaacaagcagatatcatcctgatattgtagagcacatgatttcttgctgtattttcattgacttttttccagtgagcaaatagaatattttttacattagttttcacttctagttagaatatatctgtatttgaaaatttacccaaagagtattgccacatcttaacaagtagattactaaagaaggaaatagccttgttatcatgttttattttacttgtaacaaattccagtttctaaatattcaaaggaagtgcataactagtgttttccagataacttgtttggtaggggttttaggggtggagatggtctgtaatcaaaaataaatggcagaatggatggatgactggcagtgacagatactgagcattgagggggaaatcatacttaaaatgaatttcctatatcttagaatgttaataaaatattatataatttattatgctgatgattagcctgtggggtttctctcctgtttcagtacaggtaggcagaacttgctacagaaagaaacttccagtgtccagttgaatgaattaattatatatatgtcattccaaattatctgatagttatataatttgaagcaaataattatatgaaaggagctttagagatcatcttactgcaattttgtgataatgaggaaattgaggtccgaggaattttacttttctcaggtcattgtgtattaggatgcttttggttgcaagtgtcagagtccccagttgaaactagtttaagtaaactaaaatatatatatatgactgggaaatctaggagtagatttggagtcagaagtgcagcagccaattggtgtggttaggagttgggtattataactttaggtcatccttattcctaaggatgtggtagggagacaggtgattggcagctccactagaaccatggggaaagggaggagccagtctctgaaaaaggaaataaactcacctagtttagtggaagaattgctgctggaatctggcctttagattcccaagttaatgccatctacatcaaaaccttaatatgtagtaggatagttggattaattaagagggtgcttaactcttagttgagtagattgtctacttagttttcattttagagcaccctgaagttggggttctaaagccttgttttaaagccaatagagcctttggctacagtcttttggaagttagggtttttataaaacaaatgcattgttggtgacatgataaatgcagatgagaatagagcacaaatctgctaaaaatttagaatttttaaaaatgataatggaaataactcccaagaacatataaactatgatctgttcaacatgcaggtcttttcagcttttctttctctttgtcccggagctaaagcttgattcaggacctggctgtgtgtcctacttggagctgctgaaaggtccccacacattccagtcaacctatatcttccttctccagggaccttgtcatctcagcgagtagatttaatttgtctttaatattaaatatgttcagtaagtatgtgtgtatgtacgtgtgtctgtttaaactttacatttgatttttcctaattatccttagtgaattcttagaaatgtgatcagaaatacccataatattaagaaaaggagaaagagagacaggaaaggacttagttaattcaaaaactgcataatatatcaagatatgattgctatcacatactaacagaatgtttaagttctctcactcatgaaaaaaaacacacatcttccagataaaaaggtaacacaaatgtgtgtaccttaatcatacccatatgtaaaactagagcggtggcatgaatcccaagaagtgggcggttgcccacagctgtacttctgtctcagatggataactgcaatcactaaccttttttgaagaatttgatatgatactgagaaaatagtgattaatcaaagccccttttaaaatggaagactttcatctataggcattaactttttatgatcagagaaaaaagcagtaaagaataggtgaaacatttattgtatacttactttcggtccagcattatgctttacatacttaaatttctaattcatcttatctgtgaagtgagtactattgcaaatatgaattcactttacagatgaggaaactgaggcctggagaggttaagtaaatgatctaaggcgaatccaggtcagaatgtgtgctcttgagggctatgagggatgtggaggattagtataggagcactgtctggttgtaaatggcagggcagaaacctgacctttgaaccactctgtgttctacctgcttccgtggcagaccttgtcccaaatatttcaggattgatcaagcaagtaacaatactaggttattgactcacggttctgtgaaggaaagaaaattgaatatttctgagaaaaattgtaccaaaatagagagtgcccttaaactgtatcagcttgtgagacgtgttttaggcaagaagtttccagtttttttcctgggaaatgctgtacagcagtgggccctgggaggaacggcatatacattaaactccttccagagaactatttgttctcttttagggacaagatgtgttcttaaaagttgggcagacttcacatctaattcttctactgtcgttacaatttcctacactaatcctaaattccgtggagtttttattacattggttggtggcattagcctgtcaacagctggatgagatagaagttagaaaatggactttttgaggtcaggaagctaagcaaccagaagaaccaatttgtcaacttaaatcatctggggaatggaaaaaattattccacaatgtgggaaataaaagaccgcctggagctactggtttttgtttttattttctttttgttattcctctttgcacttcccttttccgagcagcattatgtgtgggttatagaaagcttacatgttgactttgttatgtggtcatttgatgtggtcgcgctaacgtttattgtaaatactgtgagtatttttcacccttctggcttaattacctgtggccacatcaacctgaatgtatttgagaggtaaaggggcccaagacttcagtaagagcctttacttaaaaaaaaaaaaaaaaaaagaagaagaaagaaaaaattttcatctttgtgttgtttatcttttaataatggggcattcatgcattttccatatttggggtgatagtatttgggaaggtgaacttcatttgcaggttttataaaacttatttcttcacaatacttaggaatatatttagtataatattttataaaatttaaatactgtcttattcccttaaaaaggatattccttatgctctggtacaagaaaaaagacataagattcttttgtgaaaccatgagatgatgatgttcatgactgaaaacacatgtcctcccatgggtattggctgggtgctctctttcaattacttttgcttagtttttccctagtataatgctttataaaataaaactttatgtactgacatggcccaaaataaaacccattattggaaaaacctatgtttcttaaggccaaaaggtacattcctttattttttatttttatttttatttatttattttgagacagagtctcgctctgttgaccaggctggagtgcagtggtgcaatcttggcttactgcaagctcccccgcccaggttcatgccattcttctgtctcagcctcccgagtagctgggactacaggtgccagccaccatgcctggctaatttttttgtatttttattagagacgggatttcaccatgttagccaggatggtctcgatctcctgaccttgtgatctgcccgctttggcctcgcaaagtgctgggattacaggcatgagccactgtgcccagccctcattcctttattttttatgtgaatttcttctctatttttttggggtgatttcaatggaccatgaaatccaggttactgtttctttaaatagtgaagcaaatacacaatttaaaataatctgagcttttttcttagcagcccgaagaaaagtggttaatttttactcagattatctctttttcttttgaccattgtgcttttacatatgagcacaattcatgaatggataatcttagtcattaatttcaaaacattctattatgaaaacaatttaatattgatgaaatcaagttttaaaaaaaggtttaaaggggagaaaacttgtaataaccagacagcacatatttaaatataatagtgtaatgggaatgttttctcttttcaaatgaatttccttgtctgctagtattacttattaaaataagagtatttttctcttaaaaggtccaatgaattgaattgcaatgagtttaaatgccataaatagaatattttataatactttggaggtttctacttacaaaaggtgctctgagattcttttgcaaaatgagaaatgagttttcaaaataaacaccctgttatttgtgtttataatagattgttagatactatattacctttacttaaagagaaagatgctcgtatttatgttattttcaaattagaaaatctttctatactgtggaaacattttaaactaatacacttgactaataattctctattacctctgtagaacatgtaaactgatgcccacccatgctaaacacagtagaattgtacgtcagttctactatgtagaagagtcagctttatgtcaattcatctatgtagaagggtcagttgtatatatctcaactgtctttatgccaaatctatttgtaatttaattaatttacaagattactctatcaagaaaattgaagaaatatgagtaggggaatagaaagagagttattccataaaaactcagatgagtcccttggaaagactaaaagtgagctattaaaaaaatgctattgcactagggtaagcaagccagctgaaaaaaaattggaaaataagtagaggaaatctaagtaggaaatcagacaaagtataaatggttgaggtttatgcaagacaaatgagtgggtattctaattagcacacctatgctctgaaaagactatggccatacagtagaagatgatatacgcttatatcagttaagttcaaaatgaattatttattttgcaattttcattttgaaacgatgatctttccaattacctaaacaattaatcattcctcaaggttgaacaaaagaccttctgtgctaatgcttactattaagtattcaatatatgtttgcttcatagatttcatttcagttaatatgtctacataaaactgtcatctatttgaaacagttatgcattttctgtcatattaaagtagttaactagaaaaataatatgtttttccctaaaactctacaaaatttgtatgattagactttggagtagttttctagtttttaaagtgaaacccagcaaataattaaatattaaataattaatgtaaaagccaccttttaatttatacaaaagctaattttaagtaacaaatctcatttggcactatttattaggggagtagttcagaatcgggcacattttcatgcctgtggtttaatcatctttccattttacttatgtaacgatttcaacaattccaggaaaatccttagtgtttagaaatgaatttgattcatgacccacctattttgtcaaaatggtaaagctttagttgtttttgtttgggtgacttcctaatcattaaaaaataaagacattttgagaaggcttataaaaataaaaaaagtcatttcagttgtaggctgctgaaatgggccttggttgttgcaaagtattaaaagcacaaatgctaatataaactgtgtagcctcagaagcaatatatrtgtgagctgtcttttctgccactgtggaatgctactcattttggctgtgagaccaataataattcaatatataacacagataaagaccagcgatggtgccattctcttctgaatttataatacctgggaaattagaagtccatccagggagtgacactgtagaagaatagaccatgtagcaaccctgataatctcctcagagggtgccatctcctcaggagtttgcaaggatcttagaatccagagtctgtcccttgctcttttgagagacagtagccagggttttgtcagtctgccaggattgggtctctgccaaaacaggtcatgttggtattttattaatttataatgagaaaataagacaagcctggggaaactgtgtrcccacaacctttagccagccaggacagtcattctttctggcgagctctgtggggaacccattaaaatctggtttttcttggtgagcctggaagcagggattggaatccattggaagacatcaggtttcttttgtaaacatatgcccaggatttgaagtgagctgtgtcaatactcacaaaaacccattctcctcccttgcctgtgtcctgcctgtacagataaggggtgcaggtgggattactgtctccagagtttgcacctgggatctttgttagcatggccttaggcagtcattgcagagtcacacacacctgtgtcccccaggtccagcctttgggcaggggcatcctcattgcctctgggctttgatggacattgctggtggtggtagatcaccattgatgacaagatgataacggtggataaacatggcttttactttgatgtgtcttttgtaaatgttacttgcatacctttgttgtgattatagtccattccaggctcttcccatcttgttccagctgtgtttctgacttatctctcrtatactggaggactcgctcttcccacaggaagctgggaacctcagtatttgtgtgatttttattacctggctttgcatttcattatacccatttctctgctccagagccttcctctgctctcctgtgctgaaatccgagctttccattaaggcctagcacctgtcttacctgagcagggactgcttgcacatcctgtggtgtgctcagagcgctttgttagtgattctaggtggtactggccgctccttcatactgtgacagttatttgagtaacctatgcaagattgagagcccttcttgagtgagtggcttgtgttcacatcatccttgtttcctccaagttggaattgtctagggaggtctctgtatttttagggggaggtgggggatggttggaggggagaatggcacggacaaggagaaacgggtttctgctctagcattttgcatgctttactattttttgccatgtgtcttagcacattcggaggccaccacaggccctgtttatcttaaacaacatgttcctgagacacgtaacagtgataccggggtgggtgaaatgaattcagggtaccattttcttatgtatttagctattgaatgagcaataattttaagatgcacactgagggtaaactcttactcataaagcagccaggcaaaactctgatgaaatatgaatcaatagtctcctgtcaagtgcaagaattccattgaaaaactcaatctcacaagggcaaattcagattatttctgcaatgtgttgaaataaaatctggtataaaaatcttgagttagattttttgacattatctctcactaatatatttctgggcttctcccttaattcttacaaaggttagagtgagaaagttattaggtaagttattgtgacccaggcagccatccagataaaggttcattctagacaaggtatgtatttcatgggcagtgagagggaatatatgaagatacagtttcctacaagatggtgaaattttggttctactttaattgtagcataataaagaaatatgatatagtcagaactgctctacatttgtaaggctacgctggtgtgtcctggtcatgcccatagccagctctctttgagcctgtctctgaacagattggaatctggcacgtggtgattaacaacacttgctcccttgacttcaggggttgttgacttggtcatgtagatcagtgattcacagccattacagtgcatcagaatcacctgccaggaggacttgtgaaaacacagattgctgggccccagctccaaagttggggtcgggcctaataatttgcatttttaatgtattctcaggtgatgmacatgctgctggtctttggaccacccttggagaactgttggtatacaggcttacctcgttttattgtgctttgctttattgcrtttcatagatatacttttttacaaattgaaggtttgtggcaatctttcatctagcaaatctattggtgctttttttccaacagcatatttggaaaataggcccactttgtatttctttttcagattttgataattctcacagtattttaaactttttcattagtattgtatctgttacggtgatctgtgattagtgatcatcgatgttactattgtaattgttttgggatgccatgaaccgtgcccatataagactgtcaacttaattgataaatgtgtgcttttcactcctctgctgctgggctggctgttaccccatctctctgcctttccttgggcctccctctttcctgagactcaacaatattaaaattaggacaattaataaccccacagtggcctctaagtgtttaagagaaaggaagagtcacatctctcactttaaatcaaaagctagaaatgattttgcttggtgaggaaagcatgttgaaagccgagataggcagaaagctaggtctcttgtgccagttaacccaactgtgattgcagaggaaaagttcttgaaggagattgaaagtgccactacagtgaacgaatgataagaaagtgaaacagctttattgctgatatggataatgtttgagtggtctgaatagaagattagatcaggacaaagcctaatccagaccaaggccctaactctcttcaattctgtgaaggttgagagaggtgaggaagctgcagaataaaagctggaagctagcagagtttggttcataaggtttaaggaaagaggctgtttccagaacataaaagtgcaaggtgaagcagcaagtgcagatgcagaatctgttatccagattctgcagatgcagcctgttatccagaagatctggctgagataattgatgaaggtggctacactaaacaacagattttcagtgaagataaattagccttctattggaagaagatgccatctaggtctttcataagttgagaggagaagtcaattcctggcttcaaggagaggccaactctcttgttagggactaatgcagctggtgactttaagttgaagccaatgcttattgaccattttgaaaaatcctagggcccttaagaatgatgctaagtctactctgcctgtgctctgtaaagggaacaacaaagcctggatgacagcacatctgtttacagtatggcttactgaatattttaagcctgctgttgagatctactactcagacaaaaagattcctttcaaaatattactgctcattgacaatgcacctggtcacacaagagctctgctggagatgtacaaggagattaatgttgctttcatgcctgctaacacagcatccattttgtagtctacggatcaaggaataatttgtacttccaagtcttattgtttaataaatatattttgtaaggctatagctatcatagatagttatttctctgattgatctgggcaaagtaaatggaaaacctcctggaaagtgttcactgttctagatgtcattaaaaacatttgtgattcatgggaggaggtgaacatatcagcaggagtgtaatattaacaggagtttggaagaagttgattccaaccctcgtgaatgactttgatgagttcaggacttcagtggagaaagtaactacagatggtgtagttacccgggaggcggatgttgcagtgagctcagatggcaccactgcattccagcctgggcaacagagtgagactccatcttaaaataatactaataataaagaaaaagaaaaagaaaaaaaatgaaattgccacagccactccaaccttcagcagccattaccctcatcagccagcagccatccacatcaaggcaagaccttccaccacaaaaaaaattatgactagccataggctcagataacgattagcattttttttagcaataacatatttttaaattaaggtatgtacatttttttaaagacataatgctattacatacttaataaaatacagtatagtgtaaacataacttttatatgcactgggaaacaaaacaaaattatgtgactcagtttattgctatatttgccttgttgaggttgtcagacccacagtatctgtgcggattactggtacagtattcaggggatgcagagctcttagatgtggagggctgactktttgtattaatgggttctgcagggtgtactacaggacttcggcattcgtaggttttcatatcttcaaggggccctggaaccaatccttgcagatactaagggccaactgcattcttgggataaaaggtagattttaaccagccctatatttgtttaaggaaaggataaaaagtctttaaaasaaataatttactatgtctgaagccaatgatcattttgcttgattctgaaattcttaatgagaaaactcatttgtatattatatccctcttgggaaacaatatacaactttcaaatcccccccccccccactgtaatttattgtggttttgggcaaaaagacttaaaaataataaaactctgatatcttagtttacaaatatttaaattttcacattaaagagccttaaaagtttatttgaagcacgtaacagtatttttctttaccctgatctgtgaccaaccctatacattcttattcctagaaggaagactcttataggcactatcacagtgatatagagattcatgatgcagactgtaccgaaccaccttacagtatgctgtttgttcattagacacttgtcagcagaaatggttgaagaaacattataaaacacacatgggtcctttcaacaaatgatgtcagttcaacatctacatgaaaaaaaaaatgaatctagacactgaccttacaccttctacaaaaaccaactctaaatggatcataaactcaatgtaaaatgcaaagttataaaattagacaataagataagagaaatatctttttttttttttttttgagacagtgtcttgcactgttgcccaggctggagtgcagtggtgtggtcttggctcactgcaaactctgcctctcaggttcaagtgattttcctgcctcagcctccctagtagctgggattacaggctcctgacatgacagctggctaatttttgtatttttagtagagatggagtttcaccaggctggtctcaaactcctgacctcaggtgattcgcccgcctcagcctccaaaaatgctagaattacaggtgttagccaccgcgcctgaccaagatgagaggaagcccatgtgaccaggcttcacaatacatttttagatacaacaaaagcttgactgatgaaagaaaacattgctaaactggacttcgttaaaattaaaaactgctcttcaaaaaacacccttaagagaataaaaagccacagactaggggaaagtgttcataaaacataaaaagggttcatacccaccaaaaaagagcccgcatcgccaagtcaatcctaagccaaaagaacaaagctggaggcatcatgctacctgacttcaaactatgctacaaggctacagtaaccaaaacagcatggtactggtaccaaaacagagatatagatcaatggaacagaacagagccctcagaaataatgccgcatatctacaactatctgatctttgacaaacctgagaaaaacaagcaatggggaaaggattccctatttaataaatggtgctgggaaaactggctagccatatgtagaaagctgaaactggatcccttcgttacaccttatacaaaaatcaattcaagatggattaaagacttaaacgttagacctaaaaccataaaaccgctagaagaaaacctaggcattaccattcaggacataggcatgggcaaggacttcatgtctaaaacaccaaaagcaatggcaacaaaagccaaaattgacaaatgggatctaattaaactaaagagcttctgcacagcaaaagaaactaccatcagagtgaacaggcaacccacaaaatgggagaaaattttcgcaacctactcttctgacaaagggctaatatccagaatctacaatgaactcaaacaaatttacaaggaaaaaacaaacaaccccatctaaaaatgggcgaaggacatggacacactcttctcaaaagaagacatttatgcagctaaaaaacacatgaaaaaatgctcaccatcactggccatcagagaaatgcaaatcaaaaccacaatgagatatcatctaacaccagttagaatggcagtcattaaaaagtcaggaaacaacaggtgctggagaggatgtagagaaataggaacacttttacactgttggtgggactgtaaactagttcaaccattgtggaagtcagtgtggcgattcctcagggatctagaaccagaaataccatttgacccagccatcccattactgggtatatacccaaaggactataaatcatgctgctataaagacacatgcaaacgtatgtttattgcggcactattcacaaaagcaaagacttggaaccaacccaaatgtccaacaatgatagactggattaagaaaatgtggcacatatacaccatggaatactatgcagccataaaaaatgatgagttcatgtcctttgtagggacatggatgaagttggaaatcatcattctcagtaaactatcgcaagaacaaaaaaccaaacaccgcatattctcactcataggtgggaattgaacagtgagaacatatggacacaggcaggggaacatcacactctggggactgttgtggggtggggggaggggggagggatagcattgggagatatacctaatgttaaatgacgagttaatgggtgcggcacaccagcatggcacatgtatacatatgtaactaacctgcacattgtgcacatgtaccctaaaacttaaagtatactactactactactactaataaaaaagggttcatgccccaaatatacgattcttaaaattcaacaataagaaaacaaataacccagttaaaaaataggcaaaagatctgaacagatacctcatcaaagaaaatggcaaataagcttatgaaaaaaatgtctgaacaatacatgtcattagggaattggaaattaaaacagagataccactatgtactttattattattattattattattattattattatcattattgttttaagacagggtctcactctgttgcccaggtgggagtgcagtggcatgaacatggctcactgctttctcgacctcctgagctcatgtgatcctcccaggtcagcctcccaagtagctgggaccacaggcatgcaccaccacacttggctaattttgttttaaaatttaacttttaagttctagggtacgtgtatagctttgttatataggtaaactatgtcatgaaggtttgttgtacagattgtttcatcacccatgtattaagcctagtacccattagttttcctgatcctctccctcctcccaccctctgccctctttcccatagaccgcagtgtgtgttgttcccctctttgtgtccatgagttcccatcatttagctcccccttatcagtgagaacatgttttacttggttttctgttcctgtgtagtttgctaaggataatggtctccagctccatccacattcctgcaaaggacaatcttgttctttttatggctgcatggtattctatggtgtgtatgtactacattttctttatcctatctgtcattgatgggcatttatgttgattccatgtccttgctgttgtgaatagtgctgcagtgaacatacacatgcatgtgtctttatggtagaatgatttatattcctctgggtatatmcccagtaatggggttgctgggttgaatgggatttctgtttttaggtctttgagggatcatcacagtgctttccacaatggctgaactgatttacactcccaccaccagtgtataagtgttctgttttctctgcaacctcacaggcagttgttattttttgactttttaataatagtcattccgactggtgtgagatggtatctcactgtggttttgatttgcatttctctaatgatcggtgatgttgaactttttttcatatgcttgttggccatatgtatgtcttcttttgaaaattatctctgttcttgtcttttgcccactttttaaggcagttgttcatttttttcttgtaaatttaagttccttagagatgctggatattagacttttgtcagataatatagcttgcaaaatttttctcccatttggtaggttgtctgttcattctgttgatagtttcttgctgtacagaagatcttcagtttaacccacttgtgctggaggttacaaatttttttgtgtgaaaaattagaccttggcgatgaccttgagtagcaggatataaaaaaccccacaagcttagtgttccaataatggaacactaggcataaataggttaattagatcctgtttgtcaatttttgcttctgttgcagttgctttgcttttggcatctttgtcatgaaatctttgccttttcctatgtccagaatagtattgcctaagttgtcttccagggtttttatagttttgagttttacgtttaaagtctttaatccatcttaattttagcatagtatgtagagaaggggtcaagtttcaatcttctgcatatggctagtcagttacaccagtgccatttattgaatagggagtcctttccccattgcttgcttttgttagcgttgtcaaagatcagatagttgtaggtgtgtggccttatttctggtttctctgttctgttccattggtatatgtgtctggttttgtaccagtaccatgctgtcttgtttactgtagccctgtagtatagtttgaagtcaggtagcatgatgcctctagattttgttctttttgcttaggattgcattggctattcaggctctttttttgttccatatgaattttaaatagatttttctagttctgtgaagaatgtcagtggtagtttactaagaatagcattgaatctatataaattgctttgagcagtatggccattttaatgatattgattcttcatattcaggagcatggaattttttccagttgttcatgtctctgatttctttgagcagtgttttgtagttcttgaataggtcctttacttatcttgtttgttagctgtattcctagtttttttgtttctttctttcttttttcacaccggctaatttaaaacattttagagatgggatctcaccaagttgcccaggctggtctcaaactcctgggcttaagtgatggtcctcctgcctcagcgtcccaaagtgctacgattacaggcatgagccaccacgccccacctacacacatgttagaatggctaaaatctaaaacacttacaatgccaaatgctggcaaggatgtggaacaagaaggaccttcattcattgctggtgggaatgcaaaatagaacagctgcttcagaaagcagtctggcagtttcttacaaaggtaatcatagtcttagatatgatccagcaattctgctcctaagtttttgtcaaaaacatatgttcacataaaaatctgcacacatggttatagcagctttattcatttttgccaaaagttggaatcaaccaagatgtcttttmccaggtgactggataaactggtacattgagacaatggaatattactcaatgctaagaagaaatgagttttcaagcccccaaaagacattgaggaatcttaaatacatattattaagtgaaagaagtcagtttgaataagtctgtatgttttatgattccagttatctcacattttcgaaaaggcaaaactatgtacataggaaaaagataagtattgtctcacatccattaggagcaaaagaacaaggaaaagaaatgaaaaaggaaactaatgactattagtgaggatgcagagaaagcagaacccttatgcacagttgataggactgtaaatggttcaaccactgtggaaaacagtatggcagttcctcaaaaaactaaaaagagaatgatccaacattggatgcaacattccacttcagtatatatacccaaaataattaaaatcaaagtctctaaaagaaatttgcacacacatgttcattgcagcattatacacgatagccaaaaggtagaagaaaccccaggtgttcatcagtgaatgaaagggataaacaaaatgaagtatattcctttgatgtaatattattcagctttaaaagggacacgtgttacaacacaaatgaaccttgaggacgttgtgctgagtgaaataagctgatcacagaaagacaaattccaaataatttcacttttatcaggcatcaagagtagtcagatttggaaacagaaagtagaattgtggttccccggggtgaggggagggcagttgagataggagagaagggagtggggagttatgtaatggggatggtgtttctgttttgcggggatgaaaagagttctggtggcgatggttgcttaacactgtaaatgcacttaagactgtgaattttatgttatttgtattttcctataatttaaagaagaaaagatcaatggttgccagaaaagttcagtggttggggatggtggagagggatataaggtagaacagaaggggtttttagggtagtgaaacccttctgtatgatgttgtgatggtgaatatgtgacgtgcatttgacaaaacccatttggtggaactatggaactaggaaaagttctcattgttttccctattcatggtggggattcatttatgctaattgttttatcttctctccatcctcaaaatttgtcctcctcctcctgagaacaggtagccagcttgcagtagtagcagctttatcttgtgcagtcatctggttgtcttattttcatcttccttccccagttctttccccctttcactgctgtaaggccaaggtggatgtgtaggaagcagaggtatctccattttcctttggaaactttctgcttcttaccagctctacactttccgacatacaatgaccctttttgctaaaatttggattctcagttgaacaaaagattgagagaaaatagttgtgtccctgtcccttgactcttcctttaaaagatgtttccagtcaccatacttaccctctgagtttagattttgccaaattgttggcagggtttgaaggccaggacgctctgtgtgctgctatttctggatctgccattgacagcaaccagattacagtgaagcccgtgaactgacagtccagggcaagtgtgctgttgccgkgggcagtccacgatgggggcctctccatccttctgagttaggacagtcattcctcccgaggtggcttgtcctttctgatgatagattgagggagacaagcagcacatgagtagacacacaccttgcccgagcagttggtgccatttaacagtttcttcccactcttgacattttcattttcctccttcacctcgctcatcactagttgtttgcatcttattttctatacacagccgtaatgcagaatgacagaacacacacacaagctccattactcattttctatgccgtattctactcaaattacacagtgattttgcatgagctgagccatgaaaggggcatacgattttaattgtacactggccttgtgcagggcatcattcaagatggaccgaaattttcatgaagcatggctgcttaaaaaagcagcagtgaaatgaaaaggtgttgcatttttgtttcgctcatgctggcttgcacttgccttgtttatcaagaagtctctttcccagggaacaatgaggatttttaaatcacattcctgggggaagaacattgtgttgtcaccctttcattctccctcccctcccccagttttactgaggtataactagcaaataaaaattgtgtatatttaaggtgtacatcatgatgtttcgatacatatatacattgtgaaatgattaccacccctcacctcacatagttaccttttattatttgtggtaaggaaagttaagatttactctctcagcagattgcaaggatacaatacagtattatcagctgtagtcaccatgctgtacattacatccccagaatttgtttatcttgcacaactgaagcttcatgccctttgaccagcctctcctggtccgttcattcttaaatgctgttctgggctctggggtgactcaattgtagaagctatacagcatttgtctctttttstccagcatgatccctagaaagcctgagaatctattaaaaacattgtggcttcctaaaattaaagtaaatttatatatatatatatatatatatatatatwcatacacacacacacacgctataaaaatgaacaactttagtacaagaggtagcagaatggtcggtcactgatgcagacgtttctcaaggattttagcttcagacttacatggaatcaaccagcctctctacttccttatttccatgatactcaagtcaccagctgtgttaggggttgcatgtctgatgcctttgattttgagtgctgctttcccctccttgtaaagacgttttattcaaggatggaaggttggctctgaagcctaacataacttacagaaaaagtgccgcacacagtgtcttaactcaggtaggtcctgggtttaatgtttgacgtagtaaacagctgaggacatgagaacatgctgggacatgagaatgtgctgtttttctcacatgaagttttcctagtaaatagactgaatggtgaatgttagcagaaaccatttcttttggccgcttgttttggtttctggcagtgcttttgtgctggtcactgctcttacctcattcattccccagttcttgttatctttgctttagtcacattgatgagatttccaaccttttagctcaccaaccttgcttctgcctcagggcctttgccctttctgtscatctgcctgaagctctccccagttctgcagacagctaccatttccatattcaggtcttcagtcaaattgtccctggttgctaatgagttcttatttgatgaccatatttaaaattgcaggtatacacatgcacatgtatgtacacacacacacacacacacacacacacacacacacacaatctcccttctctgctttatttttttcactgactgttctccatcttacatactaaatattttcctattttcgtttgtctcctgctactagtatgtgagtccatgaattcaggaatccctctgctctgtattctctgaattcatttctgtgttcccagtctccagaacaatgtctggcacttaggatatccataactatctattgaataagtgaatgaatggtggccagcctgcccacactgtctacagcatcaccacaattcattttccacctaggcacttacctgcagtctaaagttatcttgtttattaatgtgtttccttaattatcacctgtgtctcctttcctgaagtgaaaggaagctccaagtgaggacaggcctggcttaccttgcttaactgacattccagcacctactacagtgcttgacagatagtaaatgctcagtaaacagcagttggatcagtgaagggcttgttcttcctgcttcccgtcttcctaatacagcagttttatgtcattcttcatagcactagctccactgaatatatcttttttatattcgtgacacatgttttctttgacctttggggtgccyctggcaatgaagactcaagtgtcaatgggttgatgggaatcctggtgccaaaagaaatggcccggtctgtaaacttgcttaatctagtgcagaagccttagatctttcctagaaagtcagtgattttgactttcttgcctcatttcaaagtcatctgtcatgtgttcccactctgttgggttcagagggctctgtggacagtttggcttgaagatttcctctccatccagccttctggagggtgaaagtggacgtgctacacttgcttacaaaaaggaaagatgaccataatgtagcattttctggctgggtgcagtggctcacacctgtaatcccagcactttgggaggctgagatagatcacttgaggtcagtagttcaagaccagcctggccaacatgacaaaagcccatctctactaaaaataaaaaaatcagctggcatggtggcgcatgcctgtagtcccagctacttgggaggccaagacagcagaatcgcttgaaccttggaggctgaggttacagtgagtcgagatcatgccactgcattccagcctgggtgacaaagagagacaatttctcaaaaaaaaaaawartaaaataagtaaagcaagcagtagaagtgggtttggtygatttatgcttcaagaggtttttgtatggtggcccaggctgagaagctgagtgtgattaaaaattttcttttggggaaccccttcccaaagtagggaagacagagatctggaatgttcctgctacccctatggatctattctagattcttttcctcagcctccgggagtctgctggattggggccggtgggccacactcctagttgagatcagaaggtatgtcctgctcatgttttccctgagtttcttctcttgggccttagcagtgtccacacaaaacctctagaatgggctctcttgagaccatcacagcctccagagccacagtgtgctggtttagcgtggccttggctgcagtcagacgtggaatttctgttttgccttttacacacctacacatgatgaaaccttgtctctaccaaaaaacagaaaaattaactgggcacggtggcgtgtgcctgtagtcccagctactcaggaggctgatgcaggagaatcgcttgaacctgggagatggaggttgcagtgatacgagatcacgccattgcactccagcctaggtgacagagcaagactccatctcaaaaaagaaagaaaaaaaaagcaaagaaaagaaagaacatagcattttctaacatgacaatgtcagcttagtgacaggatgaatcacttsaggctacagcagaaatatgttttgaagaacaggactatctttgcacagggaaaaatgatgaagaggcaaagcaaaagatctgttcaatttacagatttttttaaaagctgtttttcttttcataaggaatgatctttaggatctttattggtctttctaacactcagaatattcatattacgagctaatgtggcactgatgtgacttttagaagctccccttacagatgtggttaaatttctgaattccactaagaagacctgagatctcccattggttttgtttcttgtgtcagctgcatctgcagagcatataaactgctcatgtgggattcttgccagtgcagtttgctgttgtaaagaccttagccctgactgaattctccacagggaatggttgggatgagtccttgggaaggcagtgacaatgaatgtgccaagaagagggagacaactgtctcttgccaatttccaggctagtaaatggaaatgtaatctgcaccaagtcagaagaatgtcttttacccaatcattcataaaaatgaagtcatggataaaaaccatccagggggatcaagaagacccagtaagtaatcctgtggagaggtgagcatgtttctgctacaaacatgcaactcctgccacatgcaaaatgatttgcactgccagaatataatacttccaatagactcctggtgtataccttctttgtcctgattgggtaagtattgaatggcatctgatggtgaggagcaatgtgggatcatggggtgaagactgcagtaagcctgaataataattgttattgccattctgatcttatttttaatggcaatatagtttgacaggtgtgctcatgtatatgattttttttttgagacagggtcttgctctgttgcccagactggaatgcagtggtacaatcacagctcactgcagccttgagttcctggagtcaggtgatcctctcatctcagtcttctgaatagtggggaccacaggcgggtgccaccggtgggtgccaccatgcctggctaaatttttttttgtattttttgtagagatgaggtttcttcatgttgcccaggctggtctcaaactcctgggctcaagcaatctgttcaccttggccttccaaaatgctagggttacaggcatgagccactatatccagaccatatatatgatcttgatagaagattatgctgagatgcagcactattcacaatagccaagatttggaagcaatctaagtgtgtatcaagagatgaatggataaagaaaatatggtatgtatacccagtggagtattgttcagccataaaaaagaatgagatcctgtcatttgcaacaatatggatggaactggaggtcattatggtaagtgaaataagccaggmacaaaaagacaaacttaacatgctctcacttatttgtaggagctaaaaattaaaacagttgaattcatggaaatagagagtaggacgatggttaccagagtctgggaatggtagtggtagtggggaaagagggagggttaaagagtactaaaaaaaatagaaagaatgaataagatctagtatttgataacacaacagtgtgattataatcaataataatttaattgtacatttaaaaataacaagtataattgaattgtttgtaacacaaaggataaatacttcacgtgatgtataccccgtttaccctgatgtgattattacacattgtatgcctgcatcagaatatctcatgtatcccataaatatatacacstatcagtatggatacctattataatgtatccacaaaaaaattaagaattaaaaaagatatatacattttaataacattatgctgaggaccatgtcttcatcatgtttgcacctccttcacttgcctggaatacttgcttaggacagagtaagtgttctgaacttgtttttgaaatagatgtatcatcccctctgctcttcttggcaggtctgtgtggcagcacattggtcatgggccaggacgtggactctgagggctaagtgactggtcaggagcaaggaaggcaagtcctgcttgcacagtcctaacttggtgccctctccccagaacccccaggccatggacataaggaaaggtcacgcactcactaagcacactggcagtcagcagcatcattgcacactttccaactgtttactgccagtattttaaactagttaaaaacttaactctactggtgaccacctaaagatcaagtttcagcaaagtgggacttcattcatttattgggcaactgagaggggtggggcagtgttctaggcactgggaatacagcagtgaacaaaacaccctcaaaatcactgccttcatggagcttcagtcaaacttgaacaggggttggaaaagaaactgcaaagtaagtgttcttgatattttgttgcacaatcagccaccccagactcagtgacttaaaggaatatagcagccatttccgttgcttacagatctgcagtctgggcagggttccgtgggggaaggcttgtctcagcttcacagggtgtcagccgaatgctggagcagggctcatgtaccatgaagaggacaagggccttttgtttgaaaagcagggtaaaagtgccattaaacatactgaaatagaaaacatttttcctttctcttgtggtctgtttctggacatgtcgtggtgttttcatttgcctcatattgatgggttccctcagggctgaggataattgctgggcagagcagaccgtcataggcacctgggggtcctgcctcagtgcccccatgggactagctgccaggtccctctgcccccctccagccccaggacagatgactcatgccttagctctgagtggggatgtcaagccagacttttccctttcgcttgggcccgccacctcaacccacagtggactggtgaccctctagggatttcagcctccgtgctggatgtgcttggtagctagattgggaaagggtaagggcttactcatacagagtcacctgtcatacatgtcagggttctgctagcccaggatgggacagccgcaacatcccacactctgaaacatcataggcatgtgtgtacccagccctctttgtgtctctctgccaggggcagatgaggcagccctcactgtgtggaggagccagggtggggccagggcgccaagagagtgggtagtgagtggctgagaacctgtcctggggatgtgggattacgcaggagctaaggatccaggtccacagctcatgtgccattgttccacctaaagaacacatattcacagataaaataagactgtgaccacagagcattaaacattgagcataagcccttgtgagcacagggccctggagcctgcgctgttctcatatccacggccctaagctggaggagatgcttccaggtgactgtctcccaaggccagtgggctggtgctggctgttgtctaggagcgcatcccaggtcttgggaggatagagttttctccatatgggcctcttcatgctactcttcatgtggctgggctttccttgcagcgtggtggctgggttccaggaaccagtcctgggagatccaggcagagctgcattgcatttttagggtctagctatgggaaccacagagtcacttctgacataactcttttgttgagggaatcacaaggacccagccaggttcaaggggagaagatacagatgtctggatatattactggggctgtatttttasaaaatactatctgccaccgtaagatggtatgtgagatggggatgagataggatgtgagatgtcattaactgtgatgtagaagtttgtgggggaaaacaggtttggggtgtgatggggaaaatcagaagtttggcttggacattttaaatttgagatgtcactaccttagtggagacgagaagtatgtattggacctgtgggctggtgtccatggaagagaagtctgggttggaggtgaaaatgtaggagttgtcataaaattactaagtgtgaatgtatttcctggtaggggacccctcagggattgcaattaatttgctattgaaggtgacctattcattttatgtttagactgatgatttagaaggttttattgtcaaatcttttcaacttatgtatttcgatagaaatgacagtcagccaagcaattttccttatgagggctctgagtgtgtgtgcatgcatgtttacctgcacatatgtgtaagtactgcattctagaaatctcagccttgaacttttccttatgatgttgtacagtctatggtttttagtttatgtgtattttgagatattcaaattttcatttacatagatatatgcattttayttattacctcgtaaatttttccaggcatactatgtaagatcaggttctagtttaaatagtgcttcaaagattgggaggcaaaattattctttcttctgtcttctggtgattttattttgcttgaagttataatttagaagagcattaaattaggatatttggaattattctttggaccttacctatacttgaatcagggtttaatagaatatattggacaggcgcagtggctcacacctgtaatcccagcacttttggaggccgaggggggtggatcatgaggtcaggagatcgagaccatcctggccaatgtgaagcctcatctctactaaaaatacaaaaattagctgggtgtggtggtgcatgcctatagtctcagatgctcaggaggctgaggcaggagaatcgcttgaacccgggaggcggagattgcagtgagttgggatcgcgccactgcactccagcctggtgacagagcaagactctgtctcaaaaaaaaaatagaatatatttaacttttattaatattctatgaatcataagtagcaaatttcctctcaaacagtaagataaatkgactgatggcaaatgatgggatgtgttttgatcttaggagaaagacatgccatcataaaatattttaaagacatatcgttagaatacatttcatttaataaagaatgtttccataaaagacttgaggcaaagctattgaagttttatttaaaaagcattttattcctccttccgtgaagattttcccctttaatcttctgtgttttcctttctttcccactttctctgttccctttattttctcttctctttctgttcccttcctttgtcttctcttcccagaacaaagacctggattcttgcttgcaagggggagattgaaatgcaaatggaaaggaaaacacgaatgataacactaataacactcctgtccatgttactcccgcctttcactgtaactgaacctgaagagggagcaggtatcagggtgcttttgctagcataaacactggggcacccttatgtcttagctaactgttctctttgagttatttaatagaaagacaccagcgtctgacgagtcttcacagtactttgtcccaacactaggggcaattatatagatttaattccacctccaacagttctaggctgtcttctggaaacccaacacattgtcctctcctgatctttccagttcttagtcagtatatcaggaatacagtcttcagactaaggccctgctgtttttgtctaarcatttttgtttttatttatccccttcaagcaacatttttcccactatatccaatgtaaacaatttgcatagcagtttacaaaagggttgtaaaccttattttacttggaggttccaagaaaatcagcagacttcttgagagaactagggatttggcagggggtaggtgggaggtattaagaggaagtcaaaagcagggactgatgatcttattttagggctggcctgggaggatgctgggagtgtgccactccaggccatgtttcaggtgcacagtaattgttttgtattgaagcagattttcagtaaacaatactagggaccaactctgcccagctgagaggaaattaagcacagttacttgactgataatgatgccaaacagtttcaggtgttaggatttcattacgactgtgtgttgtctctggctgtacatttacattttgtgtcaggtatttcaaattaatcatgagcataattaatagttgtagtaattagattaccattttatgatgatatcatgtaacagaatatgaagcagcaggaaaaatgcggaggaccactcaggtctagatagaatcagtgttctgtgagacttatcaaaacaggtcagctctaagagttaacgtattgatgcttcattacacagcagcttcttattacaacaggtgcaaatgaagacaattttaatattaaatggaaccccctcgggcctataggtcccmaagcactaacacagaattattttatgaggataatattttaacaggcattctagttgaattataggttatttgataactgtgaagaagccagaaagcaatgtatggttttacatttcttaaaagctaaattgagttaaggatcagtgtgcgtaataagctaagaaaaaagggagtttggctttttagaactttaatgaattattgaacatatttcagaaagaggatctttaaacagcttttcgaatagctcttgttaacctaaagagacacttagtaaactatccataggctgatagaaaaaggacatttgcatggaagtcacttttttttttccgccatggtttgcctcggaaagatttcaaatgattgtataatgagggcagaaagttgcaaggctacatataaactgcatgctacttaataaattattcatgttagcccaaaggtataattattcagtgaaatgagaactcagaaaattagttctgtattaatgtttatttatactgatcattttttttttctttacatgctcacattttcctgctcagagaggtaatcgaagggcagtccacctacgtgccacaagttctgagtaaatgtggaatcaggttggaagtcccagggttcatagtgtcccccgttttttatttttatggtggtggttgtaatgtatttgcttttagagaaatggtttcttttgtatgaaagggaaagtcaagctcttattatttagcagtccttcttcaaagggtgtgcatggtgaggagctgcaccacggtggtgcccgcagacgctgcttcgtgtcccccatgacagctctggtgtgaatagtcacagtgccaccattttgggtcctggtaatggtggttttccccacttctgtcacttaccacccacagccttttctctctcagcccagagcagacaccattattcttatctttgtcttgtttgttattatgtagctctcagctgcaacggtatttaacacgttttacacatttttgttggatattccctgcttggccccttgactcctagagaagaatcctcagaacattaggcaggtgctcctttcgagacagacacaaggcagagtgaatcattcctctgccattccagaggctgcagtcctcacagtggcctctgagtcctgcatggcctggccccatcacctctgtgaccttctgtctctctgcccctcatgcagctgcctcctgccagtggggcctctgctgcctcagctccctccctggaggctgtaatggctgctttctcaccttcttaggtcctagtgtcaacttctcagcaaggctcaccctggccactgccacagaactgccattcctgcacccagaggcctagaacttccttaccctgagctgtttttatttctgcttagtcaccaccttctagaatactatataatttgtcttttaattatctttgttgtttattgcctgcctctctgcttgaacaggggatctttgtctcttttcctcaatgacatgtgtcagatgccttagaccagtgcctggcacatagtaggagctctataaacatttgttgaatgagtgaatgactgagtttcctgaaattcttcctggaaacactaaatctgctgccccagggtctgttagagartgctggactgccatgctatgaatgctcaatgaccagtgtgggtttccagttatccttgaaacctaggaaagaaagggcagggagatgtgaaaccactgaagcagtggggagctttcggaggcttaggggagaattcagcagggggatcctgctggtcacaacaccgaatccattcctccattgcttyttggttaccagtcctttggaaagtatgcctctgcctggtaggagtgacaatactacgagagccacacatgtggcttgggtgttgagcagggatggccacatgtgtgttgaagccctgcttgtgtttaactgagagggttttgtgaactcctacaggtgtctgtccatttgcatgcctattgggcccccagtttytagagcagcattgattgccatagctcagctgatttataaagcatgtgcttgcctgggagattggggtcacggtttgcttggaaactttttgcagcaggaagcagtggagcagaagaaatttttggaagagttaaatgtcagggataaggctaaaggcaatgagctgaatcttttgtttcagtaaacttcctgatggatagctttgccgttccctccccatgcaaggcacatgtggtgagagggttagggagagaatgcatgctatcttttactttrttttttttgagacggagttttgctcttgttgcccaggctggagtgcagtggtgcaatcttggcttactgcaacctccacctcctgggttcaagagattctcctgccttagcttcccgaatagctgggattacaagcacctgccaccaagcccggctaatttttctttttctttttttcttttttgtatttttagtagagaaagggtttcacaatattggccaggctggtcttgaactcctgacctcagatgatccgcctgcctcggactcccaaagtgctgggattacaggtgtgagccaccatgcctggccagccacaattttaagttaacattttctagtagccacatttaaaaaagtaaagtttaaatatattttatttaacttaatatgtttgttattattttaatctgtcattaatataaaatttactaatgagatattttacctttttttcatgaagctttcaaaatttgcagtgcattttatgcttacacctcaatttggactagccacgtttcaagtattcagtagccacatgtggctgataaattggacagtgaagctatagagagttccttgataacataaaaagcttatctctttgttatactttttacttatatagattctgtctttcttttcaaaaaagtttgatttaaagtatgttttcagcctataaattatgttgtagcatgcttgatgttatgaagtcagactgtggaacacagaaagaaaatgtgtattactctatagatgatcctgaatatgtttaatagatgaaaccattatatttctccccatttaataattgatgagtcaagaagtcttaaaggtatatccagtagaagcagagaacataggaactgagagatatataaatatctgatacatgtttttattttgcttaagtgacactttatagaggtctggtgtaagaattcatatactgtcgctcttttgtatgttgcaaaattattatcatttcaaaactgggctggaacttatatataggagttatatcttagactttctccaatgaattttggctaccaaacacctcaaatgaattctgcagatagtatttcaaggatgcttatggtatggtaagtgtaacttgattaactacagaagatgattagaagttgtaatagacactgagaatcctgtagtggtctttgatacccatgatagataagatgatgaaggtaactcttaaaattaggaataaatattataacattacatttttgtctttaaatttctgagcaaaacaaagttgatgacctttagatttaaaacaagaaattgttgtttaaagatgttaaagataaacatttttatcgttgaatgagtccctgagtttcagctctctttcacatcaggtctttagtttattgctttctttaaacatcatgcacctccttgtgctgtttttcattccccacccccgattcagagagacaggtaattatatacacaccagctaaatgtctggtaaaatctctaggcaaaactgagttgacttgtgtggaactgaatttaaaaatgcttgacggaatattgctccagtctctgaatacttgtcaggttgcatttactgcaattgcctccattaccaggatgtgtgctttggtcctgagagagacacttttccctgcctctcccccttttcttccttttcactatatagctctggcttctgaggggtcacagtccagcagttattcattttgtccctctgaattagaaaagaagtataataatttaactgaaattaggtttgttttaaacctaggcaactgtctttttatgaagaaaacatttacagtataaaataggagaatgtcacatgagctgtataaatggaatatataatagtgtggatgtataatgattatcatttgtaaggcattctttcaaaagtaagtaactggatttagagaaaattaacctttcattcgtaagtgaattaaataaagaattggacattgccaggtgggggcagagaaagccagagtttttaaatkaaaaaaataagcaaataaaatctttaaacataaatggagataagatttgaattgtatcatatatggtaacctcttttttggctggtgtaccgaagtctaaaaatgtacaagtggtagagtttataaaaactcattcctacttggcaagggtaagaaaggaaggtggtcacctagaatcaacatttattaacttttaaacgtcgtttcgtagggaagaatctccctcctcaaagcattcagcctgagtttatttaggattcagttaattgaaagataatctgtggcatcgataggaatcatcattttccaaacatcttatttttagaaacgggcttcacaagctctttacaaacattggaatccatagtcattgaaatgggtggcgtgttttttcatggggattgtgaatcagtctaaagcaaaatatgtgtttatgatttgcatgtaaggtaactgaagtttagcaaaaacaataatttgtcatttagaaatgatcccagtctttggaaatatttagaataataaatttcaggttaagtttttttttcacggtttaatcaagttaagatttttgggatacttagtatttggttggctttactaaaagaaaaatatttattggcattacattaaactgcttaaaaattaaacgaagacctagttaaaagatgctggcattaagacatggttttactcaatttttatacctggaaccccaaaaggaacaaaaagaatgagaaacaaagaagaagatgctatgctctgttaaatagctacaacttcaaaccacattttaaagaatacctgccaaatagagtgacatttggaccaaaggagagaggatgctgtgagcttacatagtcctctaatttgaggcagggtatagttttctcaaggagtcaggcctgtagaaattaaatggcttcactaaaataataagagaatagaggggcgactctctctgtgcaacttagttgtgcaccacagaaaactggaggactcggaggtgagggaggaaaagagcttctgtgtagagttgggcaggctgtgacttaaacagctctagggatcccaggaacataaaagtctagtgagtggaggcccctgatgttggagcccaatctgcacgcacacctgcgtgcacacctaggccaccatcgtgactgagtgccatcttaatgtctagggcagcttcctgagagtgggagacttctcaaagtgagactgaaagaaggctcaggaaggtggtgttcaggagcctgtgacatgaggggcttctttctaacctatatcaatgctgctaaagttttacacttgagtgtaaaatactcccagggtacaggacttgaccatagtggagagaactggagattaatgctggacttgaagctggctgctcttcctatgaactgacaggttgtctccactgcagcatgaatgccttctagttctgcctgccacaccttggcataggcaggcaagttcatagaataatggaacacagacaaagctagatgtggaatatacatcagaagacaaattatctcaccaacaaaagaagaattcagaatcttagtattttgtggccttaaaggaataatgaaaactgggttttctcaaagtttaaaggaaagatatatggttaaagaaaataagaaatataggagatagaaagtgagctgattaatctgcgtgaagaaggagaaaaaccattaggaagagggaagtcacattggaagccaccaaatataacaaacacaaatgaaaacacaggaatcaacagacttgagaaacttctacaaaacaaagtgaaaaagatgagagaaaaaggatttctgtgaagatgatacataggagagacaaaggcttattcatcacatattacttgtttttccaaaggaagagaataaaaatggaaacaaaaacattcaaaggtataataggataaagccttgcttataaaaaaagaaagatgtatatgtgcttgcaggtcagaaggccacactatttactaggaaagaaactagaaacaaatcccaagaaatgtgctgctgagcggtcaaggacattgggaacaacaggactgagggacactggggtgagccacacggcctttggtagcctggtgaaagcagtgccaggagacagcacagcaagttgcaaggcactgggtagagcagagtggaggtgaggaaggggagaagagtacacgcagctcttctgagaagtttcatcatgaagaagctgagggagatgtggatggacctgaagggggagatgggactgagggagcctgtgctttttaagatgggaaagacctgcacatatttaaatacccctagtgaatgtgaggaaagagaagggggttcttaaccttgcctgcacattggagccacttggagtgtttaaaaaaaacactgatggtgggtcccactcagaaggattcctatgtcatcggtgttggggatggctggtgttgagatttttaaaactgcccaggtgattctaaaagggagctgaatttgaaaaccatccttgtaaaagatgaaacaaagcttcaagagttgggtttcctcttccactgtagctagaggaagtgatggaagtactttgagataggtaggtttgtgagaggggagctgaaggagttttactgcttatggcttctgcgttctcttgaagggctggtggtgtgatggggaagcatgttgggaggaagatgggcaggcactgagaggagaggagtgaatttgcagcactctttcatggagaaggagggagaacaccaaagaggtgttgaaccaaagggtgggcaggcagtgctgagaaggccgaagtttgagatgataattttatggaggcagctctttcttcttcctaggtagagagtgggcagcccataatgtgtggagaagtaagttttctagtgaagactagagaagttagttacttgggagattttcttattttgcccataacatagagaatcagacactggtagaaataaaatcaattagttaatacacatagtgcattctgttaaatcctgtctagctctgccttggtaggctcttaatcgtatttctgtagttacatagaaatgaagctgaacactatgattttgcttatagggaaaaacatgactttcagtcccagtgtttcaaacgcatcagtaggaagggctaatttaggcgccgactctttccttaaagtgaagcttttgttatattaatagatctagcctgtgattcttgtaaagagtgttgtaagttgacatggtaataactaagatttgaaacaatgtgcttacccaagctgtatcttgaaatacagtttgaatcaacttggaagaaaacctaaactaaattgggttttagtaaaataatcctgcttcgtaaatattacaaagaaaatgttatcagtctttttgggtattgttggcggagtccttagatcagagatttttgttttcrttagggccttccttctttaatgttttaaaaacattatttcagttgtgcaggtagtttgcattttaaatcatctcacacaacttgctggaaactgaaatggatgctgaggacatggtgactttttaagggaaagatgaataacatccgctgtgcgagagcccttgttccagagcacaccacatgaacaccagggcttaaactcaccaggagcccactgagagcccatgtatttagatggaaacaaaaatggacataaaaattaagtttgaaacaggtagtctaaaacatcaccgggagttcactaatgtcaggacagaataaacattgactactcaggacaagttttcagaagttccccaagccccttctcacttggttgggttctgctgacgctggtttactctgcatctcacccctttgcacacagtaacctttggagatattcggcatcgtagtaaacttggtggttgttggggaaatttttgtttgctttttcattcagcattttttttttttttgagacagagtcccactctgttgcccaggctagagtgcaatggcatggtctcggctcactgcaacctctgcctcccgggttcaagcagtcctcctgcctcagcctcctaagttgctgagataacaggtgcctgccaccacacttagctaatctttttgtatttttagtagagacgaagtttcactgtgttggccaggttggtcttgaactcctgatctcaggtgatctgcccgcctcagtctcccaaagtgctcggattacaggtgtgagccactgtgcccggcctttcagcatttttttaacattgtgaaatggatgtatgggtgatactgtgctaggcaccaaggcatgaagacataattcagacttggctcttattctcaagaagtggactctagacttttagaagcccagggaagcaaagacatttttcttggcttactcttttaagtgtttccacagtattcttagctattagaaaataaaaattatttattgttgcmattgttagaaaaagtcattcatctcctgtctcttggccactgtggagccctggcattaaggaaaaaaaagtttggtggctggcgatcagctataattgtgggtgtaaccttctcttcttctagggtgttggtgagctttagcctcctgtccgtcttgtcctttggcctgacttatactgtgttcagcttgcaaaggacagctgtaaaggagcagcatgaagccaaaatcaataatagtgatgtttttagctcagctgtcatctccctacccccaaacctcaccaaaattttatgtctcagacagtttgtcaaggacaaatgtttggtccatgtcccaccagggcaggttttctgtcagccaggagattctagctgtgtgtgtgtgtgtgtgtgtgtgtgtgtgtgtgtatgtgtgtgtgtgtgtgtgtgtgtgtgcgcgtgcacgcgcacgcgcatggattaggtgttaggacacmcaagtctaaagatttaattgtacaaatcttactgacaaatgttttactgatttgaatgtgccagattatttaaaaactggaacaatataacagatgttttttaagttctgtgaatatgaaaatattttaaaaaggtgagtatgtttttagttctttgacaggggcttatatgtctctgaactgatattaattatctatgctttgctgttttgccagtgaagtcactgataagccaagactaggtccagcgataaaaattatttgggaatttagttcaggatttaaagagtggcatttcctctgacctttttttagagctgacactttgtggcaggccaagtgtaatattctattccttctaaatacccttctctttttctcatcttaaaatctttctctttcaaagctgatgcaacagtggtgtaaaaccacgttatttctagaattgctctgggccacctgatggtatacatatttcttacagtttacgaagtcctaccagattcttctctgaatatgaccacggggaattgtttggacattaacaagtgcattgtgtaagggaagtattttacttttcagcagtaatattagatgtttgtgaccaaagctgacgagtgattactggtttaacagccttatgtttcaacagatacagcataactataatgtttaaatatctgcagtgatggccaccaggactgaagtttctttctcctcttaccttgaacaagagaagcagaagggccactgtttacagggagttgatgagaccaccttccttmgaaggyccttacttctctggttgatgaatgtcatactgattgcacccaagactgagttcttggtacacgtggctgggcaaattcttggaacaggtgtctgggctcatttccctgagtggcatggagagccttcttccatgatcaggcctgcaacttccctcctactcacttatgggcatcacgctccccctctggagcccgttcctgctatttctcctgcctgaaatgctctgtgcccctttccttccatctctgcctaaatgctgccttatcagagaagcccacacgccatgtaaagagcagtacccrctcccttgtcctgttgcctatgtcccctaccctgccctggtttgctgtgtgggacttatcacctatcctattagatatctgtttatttatttatcatctctgccctaggtggaatgttaggtccacagagacaggatctctgtactcctcactgtcgtactccgggcacctgagtgtatggcaggcacttggttattgaatgaaggactgaatgaaggagtcataggggctctgtgtgtatttgtggaatgaaagaggggggaaggaaggacttgacacttagagcacctaagtatggaaggacttaggacattgtcccttggaaagtgggtggtgattgtcccggataaaggaaaacacccctccccacaaaggggttgccttgagaaagtgggtagttaggaagtcctggcttcacgctcaggggtagggtggctgtatgtctccttttccaggggatagggctcctgttgacacctatttctccagctaatgtttcaaagcaccctcttccattcttaaaagtttcccaatctgggtgataaatacatggtcacccacttaagggatttgattgcatcagggatggagttctgtatatgagaactacatgcagggagcactgagaggagtgactctgggagcacaggcattttgtacccttgcctggacggggccctgagggaacgggaggccggccttcagaggaccactgggcgtgtgcagttaacagtttggtttgtgtttttctccatgtttctctgtatacagaggtatataaatttaaatatgtacatacatatgaagtccacccctgttttatttttacagaaatggtattatgtcataccgtacttaccaaagtcttttttatttcgtatttcagaatatctttgctggtctgtacctattgatctccttcgttaccgttacttttaattgcagcataatattctatagatggatatatctgacttatgcagtcgtgcccctgttgatgtgctttcagactattttcatattctactgttaaaaatactttttttgtgacaaaagatatctgtatgcatgtatccgtatgctgagagtgggatttctgagtcaaagtgaatgtgcgtttttaaacagtcatcaccagatgctttccccaaaggaagtacagttcttcctgcctgcagcaatgttaggcgtgccctttcctcacatcttgcccagcagtggatgctcagatcttttaatgtttttctaatctatcaggtaaaaaatgagattatcttttcctttggctgtacatttttgagcctttatcatagagtcaagtgttgtaatgcattctgtaactccaagatatgtagcatttactaactgcagtcattcattaagtaaaacttagaccattaggaagatatactgtttaagtatttaaataactgaacacatcttcctgtgttttatcactttttttcatatctagggcatttcacatgtttccaggtttggttcctaggtatggctattaaagaactttcagatcaaggttgataattgggcatactgggctggggtgcagtggcttacacctgcaatcccagcactttgggaggccgaggcaagtggatcacttaaggtcatgagttcgagactagccttgccaacatggtaaaaccccgtctttactaaagataaagaaattagctggctatggtggcatgtgcctgtaatcccagctattcgggaggccgaggcacgagaatcacttgaacccgggaggcagaggttacagtgagctgagatcgcgacactgcagtccagcctcggcgacagagtgagactctgtctcaaaaacaaacaataaataaatacataattgggcatactgtaatattctcagagatctatatgtaaaatttgtatagtcatagttttatggtgggttataattgtctctagtagattctgtgagtctaaaacmataggaagactgtgctccattagcttgtcatgcaatttttaactttgacmatagactttttttgaaaaaaaaaatattttattttttgcgacaagatctcactcggtcactcaggctggagtgcagtggcatgatcacagctcaccacagcctcaaactcctggagtcaggtcatcctcccacctcagtctcccaagtagctgtgaccaccggtaagtgccaccacacctggctaatgtttttggattttgtagagacagggtttcaccatgttgcccaggctggtcttgaactcctggactcaagcaatatacctacctcagcctcccaaagtgctgagactacaggcatgagccactacgcctggctgacaataggctttatttactcatttattgagatacaattgacggaagctataaatgctaaatatttcaaatgtgaagggatgaaatgtgatggaggggcaggcaaaggagcagtggtgccaggtgtggattctgtgtagtgtgtgaatggcgtctctgtcccttaagcccaaggcaacaatgtgaatagccacttgcgtacagcagcgtgccatattcaacttggcaggtttccatccccaagggccttagtgtgttgtaaacactttattgattgatgttcaatacattgcagcacaatataagaatatattgtcatcatatagtgatgaggggaattgtgttgtggtgcctcatgtttgtaagggatgacatttcgggtagacgtaggaaaaccgtttcacatgctacaattgttgtatatttcctctgtccaattgcacatgggccagagacttatgtgtatgggaaatgtttctttgctgctttaccaggatgtcggtcattttgctcggatagggaaaactggaaaaagaaaaagaaaaagatgtgcccagatacttactggttttcggcttcctggtgaaagtactttatgaacatagtgaaatgtgtcattctttctaatccttaaatctgcataggccatgcccataaggggctaagtgtgggctatggggtgggagtgttgcttttccttcccccacccttgttcatgcctgtcttagcatgtgactcttgatagtgaacttgcccagatgcttcaaggtcaccatttcccatattctctggcagctgaagagctgtttggatcttggaatatggagtgggatgtttgatattgtcaagagaaatgtgggtgaacagtgcgtaggtcctccttgagcccctgggaaaggcttgacaccacaatttagaaacccttaactttcttaaggttaacatctgaagaaaagaagtaatttgttctgaggattttttttcccttttgtgatgtagttcatattttaatatgaatctcggaactgcctgaataataataataataataatggataaacttaatgagcccattttatcaactgttatgcattatctcatttaatcctttggtaactttgagaaggtactgatgttatcctttttgttgttgaagaaattaaatagcttgccaagatcaagcatgactagagagtagcccacactttataggacttggctgaaagcactttttcttaatgagcaaatgtgtaattgttggtttacagggaagtggagcctgattaatgtcggggctgttacacgggccatcaagttctctcctcatgatgatgtttttagcatcagttcgttgatgtgtatctctgctcagtactctttcacttcctgtgttttggaattaaagaggtgttagattccttaaaaaaaaaaacaaaaaacccttatttttgtttggaaatggttcccaaatgcactgctggtgtaattaccaaatgctgacttctagatagatagctatagtcactgcataagccacgttgctcactcaattctcaattgcatttcttttaataacaattccgaagttctaacattatttttttcatttctgtatcaaaaatgtggtcttctcatacctatggctggagataagtatgtttatggtttaattgggtggatataaggagaggggcccctggaagtccccagaggtctctcctggatgcttctcatgcactgacagtgctgtgatgagagtttgtgagtataacagaggcaaacactcatgagggctgataattataactaagtctggcacataggagcactatatcagtgctagatgtatgtttattcattttacctctacaaccctgtggggtaggtatgattatgattttcattttccagaagaagcagctgagattatatgttggtctcaagactgcacagctagtaagttgcagagctgggattccagttcagttggtcagattctttaaccagttcttaacctgcaggctagattttagccttatcctggttcacatgtatttaaatattctggccggaggataccccactaagtataaaatagctttgaaataaagctatttcaagggaatgtctaagaaggtatctgaagcatctaaatgaagaaactagcattagaaaacatactaactggcaattttatttagaatcatgtggctgtgcattccatttcttaaagatagtaaattttcttaagaaaaagaataaagaagaaagcctctagcatcttaagtttcactcatttctgctccctgacttttattaggttacacctgatttattttagctttctcagggtatgggacaattgtttataggattggtatggtgtctacttagtctgcatttgataggagaaagtatttaaactgctctttttgttagagatgacaaataaaaagacccattgtgttgtaaccatagggttgatgaaatttatgacctctttgagttagttttaaaatgtagcttaaaaattagacattatttatttgtaagaaatcacaaacatttgaggttcacaaataatttgctgaaggggcttggaggaagtcgtttatgattttttattttaaatggggctcagatgctgcctctttcctctctgtcttgggcattgggggggtgcaagttatgctggccagagggccctgagactgaaacctactctggatacttttttagtgttcatgtggtttagtatcctgcagtggttttggggtgagtgcaaattkaagagtaaaaagccagtttataagagagaagcttgttccttgtttgctttttacctgctgctgtgtaatgtttagcccctatttgaggtcatgtccatgaggcttagtgtctctgagtaatcaatgaggaagaacagtctcatgtcaggcttgccatgcacatttaatgacgactgcccatgaaatccctggcactggattggcttgccattttttttttttttttttttgagatggggtcttgctctgtcgcctagactagagtacagtggtgcaatcatgccttactgcagcctcgaactcctgggctcaagccatccatcctccctcctcagcctctcgagtagctaggactaccagtgtgtgccaccgtrcctggctaattaaaaaaaatgtttttatagagacagggccttgctttgttgcccaggctggtatcaaactcctggctggaagggatcctcccacctcagcctccgaaagcactgggattataggcgtgagccactgtgcccagcttggatcaccattcttaactgtaaccatcctttcctttctttcttcatcttcagtgacaagtaaagtatcttattggatgtgggagattggcataggaagttagagaatgacttcccaaagtcactcttttctgtgggaagagacctagaaatcctggtgtgagaagtaatttgaggggatcaagaacttcttgattaaaggatggatttgttttcttttgttgcataataaattgctacaaatttagcaaattaaaacaacactcacttattagctctcagttctgcaaggctgaagtgagcgggcttgctatgctcagggtatcaggaagcccagatcaaggtgtctcctgactcagcctttacctggaggctctggggaagaatgcacccccaggctcattcaggttgttgggggaatccagttgcttgtagttgtcagtctgaggttcctgttttctccctgatatcagcagggggttgctcgcagcttttcaaggctatctgcctgccttttcctgtggctccctccctcttcagggcctgcagtggtttatccagtggaagctctctgacttttccctggacaccagtctaagaaagcgctccactgagaacagcctcagtgattaggtcagactcagaaattagaatctcctattctgttttttcagttatggtagcctggtgtggtggtacatgcctgtagtcctagctattcgggagactgaggcaggaggattccttgagcccaggggttaaaggttgcagggagctatacaccactgcactctagcctggrtgacagagggagacctcatttaaaaaaaaataaataaataaaataaatgaatgaataaaataaataacatggtaagaacacgtaacatgggatcataagatctactctttgagcatatttttgagtgtaccatatgttattgttgattatggtacaatatagtacagcagatctctagaacttatcttggagtactgaaactttatacctgctgattaggaactccccatttccctctccccgagccctggcaaccgtaattctattctatgcctccatgagtttgaatgttttagatgctttgtataaatagaatcatacgctatttgtccttttgtgttggcttatttcacttaacaaaatgtccccaaggttcatccatgttatcgcacattgcagaatttccttctctttaaaggtgaataataatacattgtatgtatatgacacagtttctttatccattaatctgtccatggacattttggtcttttctacatcctggttgttgttaatagtcctgaaataaatttgggagtactaatagctcttcaggatcctgatttcaatttcttttttgggtaaatacacctaagtgggattgctggatcatatgatgtttctgtttttaatttttttgaggaatctctatactgttttccataatagcaaaaccaatttacattcccaacaactgtgtacaagggtttcagtgatactctcccactcttaaggccaactgtgccatctaacaacatggcaaaatcatgttatgatcattattatgcttatgatgataggcacacgattataaacgtaatcacaggagtggcacatcatcatagtcacgagttctacaggatgtgggatctggggtgggtaagtgcatttttaaaattccacccaccaccagggtcatctcagaatgcctccaagtgcccctgcccctgtctgaaccctgctggaacaagcccaagcttgtactgttatttgctggcctgatgaacatcctatttcagtagtgatggctaatttyatttcatattaagggatttgtggaaagaaattttaactaaagtatgatcattgtatcttgatgccccgaagggtgtgagagattcttaaagatgatagtaaacgtattagaaaaggagcaattactgttctagctttgtagaactatttatatccagactcttaatgtgtattataggtgagacmaagacataatatggattagttcattgcttattttattgtgagaaggagtctatggaactgggtcactggaatttttacaaatataattgagattatggatcataagttagaaggttgattgtatgaatgggcaaatgtagcattaccatgttgatagttaccaagtcctagggccacacagcaaaagcaaaaccattagaagtagttttcctaaggctattggttttttttttgtttgtttgtttttaagtttacctcctaaggactcctcagagccactaggcaaggtcaggctgtaattcatctctagaaagagcacctgatggttaaaatggagtcaatatccattactttatcatagagatgatctcacaaaagggcacctgcatcatttagggtgcttkggttgcaagcaataaaattggactgcagttcacttaaagcagaaaaggaatttattataaggacatgaggaagctcacagactctagtggcaggccagaaaactgggctcagaataaagattgagagagatagagggtagttttagggagcaggatctactatctaactactgccctgtcttttcagggcatgttgtaaaaaatgaaatagaatcatgtctctgtccttgcaccatcccagtcaagacccagagtcctttggagaaaggtccatgggacaaggatctcccaggtctgcacctgatggagggataaatccatcaaaatgactcgggatgctattactaaccaaagagagaatgaatagatgctgggggcaaaactctaaagcaaaaacctgatgtttactgtagaatctcttgttacttaaaatgctttctcaaaaactactcaaaaaatgcattgagtggtaatttaaaaaacacttttgccttaaacaatagtcttttattactacacaaccactgccttaaatcatagaaaccccaaagcactcctcccagttaagttagaatatttcaggcatattcttatttgcataatatcaatgaaatcctttgactagtgtataagaagggtccatttagcatatcatgatgaaaacggattgccaaaaaaaaaaaactgcaagcaaatacagaggagccaaaaatcattgtctgttatcctggagtcatgttcactgattatttatttgtaaggtgaatataaactacaaaaataatcctcattctatttgttgcatgataatggcttttaaaatgaacatttgtgtctaacatgaaaaaaacctctgtatctaacagtttatgggtaagtgatcatgttctaatagcattgtatcaaaagctgcttttctttataaatccttatatttaatccctccaaccagccaacaagccacaagcttcccagggaattaatttaagattgaagataaaaaagaggccaaagttaatgacatcagagagaaagctcctgaaagaagtaatagtttcaaaaagattttgactgttttataagacaaatataagctgtcgtagaaagaattgttataaaataaggttattgcttctggcttattcaaaatgattttttctagtttataacctcaactaatcttgtaataacattttaaagtaaaattttaatgtgtaccttgggaatgacactgaccagttttactattagattgcaaaaaatgttttaaatattgataatgtaattttgtcaagagcagatcatcacttttgatagcacagaattctatacttaaaatatgagatttctaaattcacagcaaaaaggattttgttgtgaatgagataaaatttaagatttaattgtggtctggcaaggaaataatagcataaaaccaccagggaaattcaaatatgataattttggtgaatgttctcaattttaaataaaaattttttaatgtaatgactttacctwtggtgggattgaagcaatacattatttacacatttaatcttattttgatttactctaatttatttgatatcagcagcctgttagatgataatttaaaaatccgctgctaccatagttgctttaggaaaccttcctgatgataattttattcactagaataatttaagtttccatttaaaatgcgtatttaaacattataatgtgttggcagcagaagatgtttatatcaggtagaatgatgatttccttaatggacagcaatacygtacctcatattttatggtaaaggagatggattaaaattactttttactacatgtaccttctatgtttgcatggagcataaacaaggagctataagattttttttttttttttttaagacggagtctcactgtgtcaccagactggagtgcagtggtgcaatctcggctcactgcaacctccgcctcccrggttcaagtgattstcctgcttcagcctcccgaatagccaggactacaggcacacgccaccatgcccagctaatttttgtatttttagtagagacagggtttcaccatgttggccaggatggtctcgatctcttgactttgtgatccgcccgtctcagcttcccaaagtgctggattacaggcatgagccactgtgcctggtcaaaatttttttaaaaattaaaarcattctctagtcgtgccttcatggaggcatactgagcatatggcrtcatattttgtcacactctcacgtatctgctagtgtaagctacttcccagccyggtmgcacttttgaaagacttacattgggctttttgtggcggaaatggggagcaggatttgttctttgtctttctgaacctgttttagcactgcacaccctctcctgatagtgcctgtggcttctctaagggagctttattcctcagagaagaaacctctgctagaagaaaggaaagagaataatggagaaggaaagattctgtgggggaaatacacaagatggtccttccagaaaagctgctcaracrtctgaagcttttgtctatgagtattgttggccaattgttggaggactgaggcttctacctttcttcctgcgaaggtcgaggacaggttaggtgttgggtaaaactaaaccccagatgatggccttcaggagtattccaaggtcagcatgtgatggggagagaagagttgtggaagaagactttatgcccaagactttgggaagagagtagtccaggccctttccagggatttgctgtaaggtgacacctgttccccttctggcatctctcatcccgtgcgtttgacttttgttggaacatccagcacggttggttgtggccaacttgtcaggaataaatttattcctgtatttgattttgtcagccagggaagatttatgagacagagctgctgtctggatatcccttagaaggagacagtgctcctggtggcttgggtggcttcttgcctctctagtgctggaagaaaccctcagccctggtgactgtgagggaggtttcagcaactaaatgcaaaatagcatactgatctagctttaagaatttcaggagttactcatttartttttattttgtgcctgtagtccaaacaggatctcagctaggaatatggcatgtcctgttcttaaggatctgattataatatggaaggaaagaggataggtatgtaggtaattcaagtataaatgccacataaatgagatataaagtaactgggattcatggaagaaagaactrcatcctggttgacgagatttkaaaaaagtttgtatcaatcaatcaaaaactttgtgtcaatgcagagaagataagttaaagaagaaggagcagctgtagaagtccctgagttctaggcagtgtcatctcagactgttcgggattgggctcaragggctggaaaggtctcaggcacatcaggtgcacgsacccttggagccacagtagcaatgccctccctcggcccaccccatgtctctttgaggtggcttttggattttctcctcaccaaggaaagatgttgatctcctcatacttaggaaatactccacaaatrcttttaaaattccaatgacatctacgctagggttacagttaagcyctatggcctcctgctcattttttaatcaacttgatctcaggcctgaaagtaaccagaatgttcatgtgtactgttcttccatgaggtaattaattgaatgagcaggatgaatgggaacttgaaattaacaatgagctattgaaaaaataagcaacaagtaataattgctccattaatggactttccttgtctgttgacatgactgcctttattcttatttactgcactcgttaagatggtaataagtattatcttttaattttttaaaaataatattcttaattcatattggtggtttacactcagtgtttttactgaataatgtgccttcctacaaagagcttaacatgaaggtgataaatcattatcctttatcactcattgctctatttacattatcttttacattcacgtgccttaggcatttatactgtataaagagactactgtatggacactttgtttttttaaaaagtatcatcagaaatcaaaggagggatccatttgccaaatgggcaccataaagaccttttaataacagctacagaaatcaatctcattcagcagcaaatcctgaattgtgatagatgatctgtatatcatcaaagctacagaaagctagacttctctgttaccattcctgtctagaagagcacatgtaaatacacatagattcacaatggccctcttgctagtcacaggtggtcaccagtgtgcagtggaagctgcatttctgtaaggtaatttgttagttgcttggaatggttttcttaaaagaaattgtgttttaaactgtagttaggttctgaggtcagctctcaaggtacatagttaaccattgtgtattcttccattgttctactttatatgttatttacattattatacatatcacattattttatactttcttttatttgttggaatggcttactgggctgagagtaccttataaacagggacagtgtgtcttaaaaagtgctcaggcctattcttggcaaatatgatttgttaggtatttttaaagtgaatgaaagttgacatttaataggttctagagaactatatgtctgataagtgttttcaagagagaagtttattcagaatttcaagtctgaaagccaggaaatattcctggcatatataaattgaagaatgtctgcaagtgatatagttcagtactttaaaattatggttgttacctaaagttcattaactcttattgccttgataaagctcttcagggaaagcctaacatttcttcagctacatagttatcagaaataaagagttagtactgagcttcagggcaggccttcttcaagtgtatacttcttttctgattcaaagataaattaagttatgattatatgtatattgagttctttgggtttttttggaattttaatggaatgtgaaacatgccattacaatagatttcaaaagcttagtcctataacacagaaaaatatttacctttttttcactatggaggtgagggtatttctgagatgccacatctcgactaagtaatttttaaaagagaattattcagtaaatgttttgattttatttttttttatttttaagaccttgcattattctaaccaacttctttatagggaaatatatgtaaatcagagtgcttttgcgtttggaaatattggaagcaaaaattccaaaatgttttatgttgaacatatgggaacagcatggaaatttgtgagcagtgctttaaataaaaacctgaatcatattatatgtctatattttgagatttaaatctctgttaaactagccccattctgactgccaggcatttgaggagacaccatgtcttaattttctcttatctcaagtgacactcacagagcctggtacataatagagctaccgatgtttgtgggaggagtggagtatgaaaactgactttggcatgttgaaaaccaaattcggtatttcggtgccttttctttctgggatattatatctcatatagtcctaactgcatattaaaatcagtgatggtacctttgatcaagcctgaggatattaaataactttaagaagtcagagcgtgaggctaggcaccatagttcacacctgtaatcccagcactttggtactttgggaggttgaggcgggaggttctcttgagtccaggagttcaagactggcctgggcaacatagtgagaccctgtttctgaaacagaaaaaacaaaaaacaacaaaaacaaaaaaacaattggtcatggtggcacatgctcgtagtccaagctactcaggcggytgaggtgggaggatggctagatcccaggaggttaaggaggtgggaggatggctagatcccaggaggttaaggaggtgggaggatggctagatcccaggaggttaaggaggtgggaggatggctagatcccaggaggttaaggaggtggaggatggctagatcccaggaggttaaggaggtggaggatggctagatcccaggaggttaaggaggtggaggatggctagatcccaggaggttaaggaggtggaggatggctagatcccaggaggttaaggaggtggaggatggctagatcccaggaggttaaggaggtggaggatggctagatcccaggaggttaaggaggtggaggatggctagatcccaggaggttaaggaggtggaggatggctagatcccaggaggttaaggaggtggaggatggctagatcccaggaggttaaggctatagtgagccaagtcacagcactgctctcccgcctgggtgacagtatgaaacctttcttaaaaaactgggtattagagtgtggatagcagaacattttaatgggattaaaaaatgtattcctttaatggtattattaaggggccaccaacatttttattttgaatcattatgtgaaacagttggataattagaaatttttcagtgatttgtgaagccagccatgcttattcttgagttccttggatgactgctactatagtcacaaagtcctatcttcctctgttttcactggtttaaatcaaatcattgtttttctaatgataacagcaacatgccatacctcgtgtccaccacaatgtatggattacctgatgattggagagaaatgcagtgactctggaaatggcattattgtgatgtatatatgcatgagagatttgggtgagagatggtacatttatccttccttaattaacttgccaatgagaaagagagagttcaagaacaaaaccttggaagttatggaagaatctgaaaatgatgtcctggaattagtttgcttatattttgggagtaatttttcaggggcactgaatttcacatgagcaccttaccaaatgcttacgtgttgtgtagcactaatgtaaacactgtaaatggtcactctctgaagatcagttatgatgactgtggctagcaggccgagttggactgcagaccagcctgccttgacattgcttattttattcttaagtgagggagactgatctacatgaatgtgtttttatacaaagattaacgggtgacattggaggggtactacttgatgaacactccacatgcaggatcttattcttcttaccatccttatgaaggtaagagctgttctyatccactgttacatagggctcatttgatgtaacttgtccacagtctcacagtcagtatgtggcagaataggattggaaaccagaccattcgatcccaaagacctaccttcctaccgtttaataatrccctcctgttccagaaatatgcaaaagccaatgacaagacataaacaggaacatatggtaaattggtaaccagtaacatatgcctaatatttgaaaacttttaaggtaattcactccttctgccaaaaagatgtattgactacctaccatgtgaaatgctgtgtggcgtgtatacaagtcccacttaggttcttggttcagggactgagttgggtgtaatagaagcaatctgtaatatcaatgaagaactctcctacaaagtgggagattgctgctattaaaggactgaagaagagagtaaatacacttaaggaaaatctgggaagacatcatggaggaagctggatttgcactgggcttgggaaggccaggaagttacctgagatgcagacacagggtggggttggggcactggggtgaaggaaggtggcacagctatgaacaggagtaggggaaggaagagataggactggcgttttcaaaaatgggaacagtagtgtgaatgaatcgtaatggagcaattctgtggtgccgtatctgagcaagccttgatacctgactactactcagtaggccgtggggtgtcacagaaatccttggagtcatgttgctttctgccatgccagtgaagtgatcaagtgtgacacaagcaatcacagaagcctggtcatctgcattctggcagtgtggtcttctccaggcctaatgacatctctgtttctgttacgtttcccttgtattgtcaacttctcttaaacttgaggactcaccagccctagaatggaggaggggagtgtgttagtcttagtgaattccatgtgtctcatgtttctaagtcactttccatttcatgaaacattgtgagaaattactggtgtataatgatgactccgcctcatacagagaatgcttttgaacatactgcctttgaatttgattaggtgtagacagtcaatagtaggaaacgtaggaaactcccttcttccttccttccttttttttttttttcracagagtctcgctctgttgcccaggctggactgcggtagtgcggtcttggctcactgcaacctctgccacccgggttcaagtgattctcctgcctcagcctcccaagtagttgggattacaggtacccaccaccaygcctggctaatttttgtatttttagtagagacagagtttcaccaggttgtccaggctggtcttgaacccctgaccttaggcgatccacacacctcggcctcccaaagttctgggattacaggcatgagccgccgtgccgctggaaacccttttccacagccgtataaaatatctatagaaggaccaagatataagaatgggtgaatgtattcatgaaacatttatagctcttttagagaatgtgaggtcaggatcaatatatttaaaacaatattttttaaattgaagttaaaaaaaagtaaaaagaaagaaacagaaacaaagctttattgaaggcttactgacgacttactacaggcttccttagctcctgtgctaagtctttcctaagcgcttttccatttaatcctgacagtcgccatgagaaggagggcttgttgttatccccattttgcagatgaggaaacagaggtttagagtgtgatttactgatactgtgtaactgctcagtsgcaaagtcagggttggaacacagcttggcctcactccccatgccgctgttttctaacgtctcctgtaagtggtgcttcggctcgtaatgccagtaaaatcacttatcaagcaaacctacaaaccggaaaggagtcccaggtcgtttatattctttctgacagaaaaatgtatgctttagatgtaagactggttttgataatactttgctccttttggttttgtctacatgaacacaatgcagcgtatggtttgggtttcttcgagtcactagagatgggctgcctcacaatcatttgtgttattgcatctcatgctgatcaatggaccacttattgcttacatgggtttgctggggatgttgggttccaccgtcttgcagttatttctgaaagttttaagtgcattcagccacacatgctattcagtaagtttacaacaatttgctcaatctttctgtgcatcattttataattttagagctttaaaaaatgctcttgtctgtttttgacatagagttgtttattttctatttacatggtattcttgtttagttttcatctacctcagaaggctttcatatagaattatctgctctgttggcttctgcagagttagcaggaagagtggcacttagtgccaggctgcatattaaggtagttcgagtggtatggcccacaactgatggccaccctcctgtcaaaatgtggtctccactttgtatcatccacaaagcagttggattctgattggaatactgacattgttctcataatcatttaaagataaatgggctaaaaatgttgcataaattctgtgttgtaaaatttattctttcgaaagttcgtttctcagtgccatagatgacactgacagcattattaatactttcaatattctagtgtcagaaatcatttgatgtcagtttaatccttttaatggttaatgtcagcattttagcatgaacgtttaagtgtccccaaagattgggttgattattcttcatcaagtaggctcattttaaagtcaagaaaatggctcacttgtactatcagctatgccttttcagggttttttcttctttaaatcaaatcattacaacttactatgctgacactgagttatagatctattttgacttactttatttcttaataagatcataggaaatctttttgcaaattaggcctttggaaaatgaaaacaatctcgtgtttctgtgattctaacaatgtgtttaaatcttagtgcatgacatctaaatttgaattttcgtagaaacaggtttccagagtgtattttcatgttttyatatatgatactctgttgtatttatatcacagataattatttgaatcagatttatcacttttctggcatattttgaaatagtcatacatagaaatgtggaaatacttcattagctgtagaggtgcaaatgtaccatataagaattatttgaaaacttatgtgcattctgagtatcagtacaggacttgggaacacaggccacatgtggagtttggtggtagactgctattgtttcaaggggcgaggatgagattttgttgtggacaacttcagttcatccaacaggtacactgaaccactcatgtcttccacggtgtcccgtctgttcttgcatgttcctctgccatacaactcacgaactatttgtgcacatttttttgttaacacatcaaacttgactacaacagaaccaaatgacatagtattctgtgttttcatagcttccagttcatgctgatcatcctattgctgggtttttgtttatgcatgtttttatgcagggcctgtcgatgggggtgtctttactgtgcgggctttatgtttgcagatgatccatagaaacacaaacaagaaattgtagcagcagtatttcattcctaaagctgaatgatgtcaggcataattactgaaactaacatctggagtggtttrttaaagggaaacctgccaagattgttagcatataccaaacagcattatccatatgtgccattttatcactattgaatgtcggggtgtgttagtatgaagggaaatgaataaaatccagcaaaggatcactactaacacattatcttcccagaactgattttagtttagctcgatgaagcagtttgctggagattttcaaaattgtgcccatcacccatctggagggtttctgcatacctcggtacctggttatttggtcttgttagaattaaaatgtaccccttcaggaaagttctcttgaattctttttttatgttcctgaatcctagactataaacaaacaagcaaacaaacaaacaagatatcagatattaattgaggacccactgttcagtcttgttgaaaacttggcacacatgcttgaggagtttaatagggatcttgtccagtagggcgatgaaagaacactattgtgtgattgtcagatttcttgaagtagtactgaattactactgttcactcttttccttagaagacatctcaatggttgaatagagagtcttaaggcagcgaggtgatccttgtcaaactatgagagtttcaatccttatgagtaatatagctctaataattttgccattcagcttatttacagagtaatctagagaggctacaccaacctggcatggtaaatgttgtcttccttaggcacagatagaggatgtcatgccagtctacattctgtacatggagatggaggtggaattcatagatcttcaaaaatcatactaggacagtttttgatacaatggaaaagaaagtgttctccagaaaatgctcctaagttctcctttgtgccaattattgccaagtggtaaaaactgaaaggcaaatgacattgctgtcattttgttctgttgtagtcaagtttgatgtgttaacagaagaaatgtgtacaaatagttcgtgagttgtatggcagaggaacatgcaagaacagaggggacactgtggaagacatgagtggttcagtgtgtttactggatgaactgaagttgtctacaacaaaatctcatcctcaccccttaaaacaatagcagactactaccaaaccccacatgtggtctgttgttccctagccctgtactgatactccatttctaaattctgcaccaatacagtggctccacagctgctactgaatatctagcaatagacaccctgctcttaaatggctctggaggtgaagcttccattacttgtttttttcctgtaacagcttttcagagaaataccatttggctcaatttactcatcatcctaatcttagaatttccatgttttacrtagttcaatttagtaaacctctcaatttatatcattactttatcaatccagcatcatgataaaaggaagatgtatcacatgaataaaattttcttggatgatggaaacttacctcattaagtacaaaatatttcattttatgggataattgtctaaaatatattactgtatcaggcttctaagatcttagtgccatctttattttctgagtatatatctagaagtggaattcataagtgttagaatatgcatttgtttaaattcagtaacacaagcagttttccaatgtgattgtaaaaattttactccctcaacagtgtaagagtgttttggtttttgcacatactactaacacttggtctgtcattttcgttttctccattctggtggttatgtggtattgtcacattatggggctggttagcaattccctgatgactagtgaagcacctttcttatattattggccatttggatatctttgaaggatctattcaagtattttttgcatattttcattgaatagcctatcctttaaatcaggggtccccaacccctgggctggggaccagtaccagtccttggcctgtaaggaaccaggctgcacatcaggacgtgagtggcaggccagggagcattactgtctgagctccgcctcctgtcagatcagcggcagcattagattctcataggagcacgaactcttttgtgaactgcgcatatgagggatctaagttgtgcacttcttatgagactctaaccaatgcctgatgatctgaggtggaacagtttcatcccatggaaaaattgtcttccacgaaaccagtccctcatgctgaaaaggttggggactgctgctttaaatactcattagggtagtttctttatgttctggaaataagtcctttgtcagatatacttatcgaaaatatatttttctacttgctaggttgcattttcactctgttaatgatgttgtttgataaataaaagctattaatttatttttatttatttattttttgagatggagtcttactctgttgcccaggctgaagtagagtggcgcgatctcagcttactgcaacgtctgcctcccaggttcaagtgattctcctgcctcagcctcctgagtagttgggactacagccacgtgccaccacacctggctaatttttgtgttttctagtagagacggggcttcactatgttggccaggctggtctcaaactcctgactgcaggtgatctgcctgctgggattacaagtgtgagccactgcacctggccaaaagctattaattttaatagagtctaacttacaagtttttttttttttaatagttaacattttctgtggcctgtttaagtttttttagcctatgccagggtcaccaatatactctgtgattttcygtgaacactttattgctttatttttcacatttacacttgcaatccatctggaattggtttttgtgaattgtatgaggtaggatcaagctgcctttcttccacattcaattgatccagcaccattaattgaaaagagcatcctttccctcattgcactacagggtcactgttgccatacatcactctattatgctgcctttgtaatggaaaactataatgaggacttctagaagtttgtatgtgtcacaagttttgtttcttaaaaatgtatgtgttagaatatgcaatcagagtcagttaatgtggaactccctgtcttgccatgccaacatgaaaataatagataaaatattttatagagataaatatgtatctgagattgaaaataaggaagaaaaaatctttagctgccaagaaagaagttaagactctcagtgctgagagagactgaatccacctaggtgataaggtgactggacccagtaaaccctttgtgtgctggggggttttatgccttgtagaacccagtgtgagcaagatttgggtaccctacatacattcagtagccaggaaagggtgattggattgccagactctgcctgctggcaaaaggatgagctgtagaagctgaagtcctaggtagtagatataaagaagacaaattaggtggcaccttctagactgtgcaatgcatggatttggaattgaatttttcctctaattattctagggaaaccctgggctaagaaaccaatgtaaaacctgatgaggtagtctgtagtcacactgggtagaggtagaggcaaccacaaaattattcttaagaatgcctcccaggcgcctggaagatgaaactttctggtgaatatgagctcatggtaaaaatttaggtcggatgcagtggctcatgcctgtaatctcagcactttgggaggctgagggaggaggattactttagctcaggagttcaagactagcctaggcaatatggcgaaacccatgtctacaaaaaatacaaaaattatctggacatggtagtgtatacctgtactcccagctaagtgtgagaattgcttgagcccaggagacggaggttgcagtgagctgagatcgcaccactgcactccagcctggcaacagagccagagcctatctcaaaaaaaaaaaaaaaaaaaaagaaagaaagaaaaagaaaacaagaaaaaaaaagccatgtgcggtggctcacatctgtaatcctagcactttgggaggcctaggcgggcggatcatgaggtcaagagttcgagaccaccctggacaacatggtgaaaccccgtttctactaaaaatacaaaatttagctgggcatggtggcatgtgcctgtagtcccagctactcgggaggctgaggcaggagaattgcttgaattcagaaggtggaggtagcagtgagctgagatcacaccactgcacgccaactgggagacagagccagaccgtatctcaaaaaaaaaaaaaaaaggctggatgtggtggctcacacctgtaatcccagcactttgggaggctgaggtgggtggatcacaaagtcaagagtttgagaccatcttggccaacgtggtgaaaccccatctctactaaaaataaaaaaaagtagctgggcgtggtggcgcgtgcgtgtagtcccagctactccagaggctgaggcaggagaattgcttgaacctgggaggtggaggttgcagtgagctgagattgcgccactgcactccagcctggtgacagagggagactcgtctcaaaaaatatatatataataataaagcatattgaggagagaaggagactattatgagctttcaaagataataagcaggtaagtatcaaaaaatgatggacttcctacagactattttttattattattatactttaagttctagggtacatgtgcagaacatgcaggtttgttacataggtatacacgtgccatggtggtttgctgcacccatcaacccgtcatctacattaggtattactcctaattttcccctactccccaaccccctgacaggccctggtgtgtgatgtccccctccctgtgtccatgtgttctcattgttcaactcccgtttatgagaacatgtggtgtttggttttctgttcttgtgttagtttgctgagaatgatggtttccagcttcatccatgtccctgcaaaggacaggaactcatccttttttatggctacatactgttccatggtgtatatgtgccacattttctttatcctgtctatcattgatgggcatttgggttggttccaagtctttgctattgtgaacagtaaacatatgtgtgcatgtgtctttatagtagaatgatttataattctttgggtatatactcaataatgggattgttgggtcaaatggtatttctgcctctaaatccttgaggaatcgccacactgtcttccacaatgattgaactaatttacactcccaccaacagtgtaaaagcattcctatttctccacatcctctccggcatctgttgcttcttgactttttaatgatagccattctaactggcatgagatggtatctcattgtggttttgatttgcatttctctaatgaccagtgatgatgagggtttttttcatgtttgttggcctcataaatgtcttcttttgataagtgtctgttcatatccttcacccactttttgatggagttgttagtgtttttcttgtaaatttgtttaagtactttgtttaagattctggatattagccctttgtcagatggatagattgcaaaaattttctcccattctggaggttgcctgttcactctgatgatagtttcttttgttgtggagaagctctttagtttaattagatcccatttgtcgattttggcatttgttgccattgcttttgttgttttagtcatgaagtctttgcccatgcctatgtcctgaatggtgttgcctaggtttgcttctagggtttttatggttttaggcctcacatttatgtctttartccaccttgagttaattttttaataaggtgtaaggaaggggtccagttttagttttctgaatatgcgtagccatttattaaatagggaatcctttccccattgctgtttttgtcaggtttgtcaaagactgggttgttgtagttgtgtggtattatttctgaggcctctgttctgttccattggtctatatatctgttttggtaccagtaccatgctgttttggttactgtagccttgtagtatagtttgaagtcaggtagtgtgatgcctccagctttgttctttttgctcaggattgtcttggctcttttttggttccatatgaaatttgaagtattttttttctaattttgtgaagaaagtcagtggtagcttgatgcggatagcattgaatctgtaaattactttgggcagtatggccattttcatgatattgattcttcccatccatgatgagcatggaatgtttttccattttttgtgtcctctctcatttccttgagcagtggtttgtagttctccctgaagaggtccttcacatcccttgtaagttggattcttaggtatttaattctctttgtagcaattgtgaatgtgagttcactcatggtttgcctctctgttggtctattattggtgtatagaaatgcttgtgatttttgcrcattgattttgtatcttgagactttgctgaagttgcttatcagcttaaggagattttgggttgagatgatggggttttctaaatatacaatcatgtcctctgcaaacagagacaatttgacttcctctcttcctatttgaataccctttatttctttctcttgcctgattgccctggccagaacttccagtgatgtgttgaataggagtggtgagagagggcatccttgtcttgtgccagttttcaaagggaatgcttccagcttttgcccattcagtatgatattggctgtgggtttgtcataaataactgttactattttgagatactttccatcaatacctagtttattaagagtttttagcatgaaggggtgttgaattttatcaaaggctttttctgcatcttttgatataatcatgtggttgttgtcattggctctgtatatgtgatggattatgtttatggatttacgtatgttgaaccagccttgcatcctagggatgaagtcgactttatcgtggtgaataaggtttttgatatgctgctggatttgcttcgtcagtattttattgaggattttcgcatcgacgttcatcaggcatattggcctgatattttcctttttgctgtgtctctgccaggttttggtatcaggatgatgctggccttaaaaaatgagttagggaggatttcctctttttcttttatttggaatagttccagaaggaatggtaccagctcctctttgtacttttggtagaattcaactgtgaatccatctggtcctgggctatttttggttggtaggctattaattattgcctcaatttcagaacttgttattggtctattcagggattcgacttcttcctggtttagtcttgggagggtgtgtgtgtctaggaatttatccatttattctagattttctagtttatttgcgtagaggtgtttataatattctctgatggtagtttgtatttctgtgggatcaggggtgatattcgctttatcattttttattgtgtctatttgattcttctytcttctttattagtctggctagtggtctctctaacattagatgaaagaagacatcgaaatttgaagtgcaaagagaaaataagtgttaacctagaattttgtatcaagctgaattgtcactggggattaaggatgagtatattttaaaacatgaacggaaatatggtatctttatatcaataggcaatgaacataattctaatttagagataaaaatttaaataataattgtttacttatttaaatctgtgaaactgagaaagattgaaaaayatagtagacaatcttgttgacaagaatcttgggacatagaacaacttcacacttagctgggagatttacattattcaatttttagagaaaaagtgacaaaggccttaaaattatgtgaggcctttgaacctgtagtttcactatgtgatatattctgaggaaataatatttaagcatttagctaccaagtgagtttaagagcttgaatttgaaaataaagtaaatgtgaaacatagggggatgggtgaaataaattgttaaatccatttaatagaattactgtacattcactagaaacaaattttttaacatgtcatttgataagaaagaacatgttcaatgaaataaatatatcaaacgagaaataaatacaaattgtgaatagcatgacctacttttacaatagcaaataagtatttatatctaaaatatttgaaaatatctatttatctatctatctatctatctatctatctatctatctatctatctgtctatctagctagctagctagctatctttctgtctctctctctctatcttcctatctgcctctctctttctttctctttcaaagttttaatggtggttgtacttaggtgttaatattgtatagttttaaaatattcttcattgcctatgttttattatttttctaaagttggattataatgttatataagaagagaagaaacctcatgttggagaaactcaaaccagtgtaattgttattatgtagtattgaatatacacattgactttacagtattgttgatagacagaacctgtctgctgtgttggttcatagtttttttgttgattttaaggattaagatgaatttctttctttctctctctttctttcattctttcttctttactttctttctttttctcttttcttttgagatgaggtcttgatatgtttctcaatctggcctcaaactcttggactcaagtagtcctcctgcctcagcctcctgaatagctggaactacaagtgctttctctaagatgaagttatttctgtgttttcaagtccactagatagttttcatgtttttcttacagtttctttaataacccaaatgatacaagagcactatagtgatttatatatatatatataaaaggtaacataccatatataaatttatatatttatatataatatatatacyataatagaaaacatactatatatgtgtgtgtatatacatatatakagagagagtatgatttttgttaccttttaaaatagttctttttgattctctattcttaaaagcctttttatatttttttccagtattgttttgggtccagaccatttgagagtgacatatagaagtcatttgttacacgcatgagagtgttagaagtgacaagaaagaggcaataaagagggttttctggatggggtcagtttttaattccttattgagattttacagtagctcaaaagagatgcctgttgcaggccagttatgatggttcacatctgtagtcttagaactttgggagccaagatgggaggatcacttgagcctgagagtttgacaccagcctggacagcatagggagaccctacttctacaaaaaaataaaaaaaattagccaagagtggtggtggtgcacctctgtaatcacagctaattgggaggctaaggtagaaggattgcttgggcctgggaggtcaaagcttcagtgagctgtgatcatgccactgcactccagcctggatgacagaacaaacccttgtttcaaaaaaaaaaaaaaaaaaaaaaaaaaaacaacaaaatgtgcctgtttccattagaagataatttataagggattggaaaccaagattctggtatggagggatggactatcccagcggaacacaatgaaaagtataccttgttcttgccaataagaaagaaagttgcttctacctgtgttatgagattacacttaaatatactataaatattgagaattttgagagtattagcagtgagttaggatttttaaaaaactatggaaagaaaacatcaattattaatcctttgacgttttaaccttcctaggagagaaattttttcttttgagggtagccttgtaaacatacttccagattgggggataggggtgagttggggtgtggacatgaaacaaatacaaacattgacatttaaggcagtcatttttagaatattgttatttagtaactcttgatgtctggatttcttatagagataatgaaggaggtagtttttaaaacctgcctcatgtataagagaatgtttaggaatctctttataggaaaatataaagcattattaattacttgagcttttaaccttttaactttgtattatagaagtcaaaatcatgaagggagaaaagtgtttcattaatcactacaggatatttttcaaaatgagttaatggaagtttactctgggtctttaaacaaaatataaattgacataccgtgccaggtatctaaaaatactctgtttagggtcagaagcatgatggctcatacttataataacagcactttgggaggctgaggcagggggatcacttaaggctggaagtttgtgagcaacttgtgcaacatagtgagaacccttctctaaaataataataataataataaaattagctgcgtgtagtggtgcatgcctgtcattccagctactcaggaggttgaggtggggggattgcttgagcccaggaattcgaggctacggtgggctatgatcatgcaactgtactctaggctgggttacagagtgaggccctatctctaaataataaataatgaatacataaatatctactgtctcatactttataagatatgttcatattctttgtgttaactggagtttagggagagaagcagatagagtgggattaatacttgatggggaagccccaaactagttctggctctaacagtaacttggtatgtggcttagaaaaacactcagcctccttgagttcagttttttctcaatttttgggagagggtttaatttattagtgggtgatcttcaaagtccctgccactacaatatttcatttctgtgtgcagacacagtgatcccaaaagttgacattctgtctattgactgtttctaatattctgtatccagaattactttagcactagaatattgcagaatatgctactcaaaagtgtttttgattatttttacctagctgctttattaggctctttcattggcttttagaaagcattcagtaaggtttttaaatgaagtgaatatatagattttagaaatataagttaaacagaggttcaagtatatatatttttggtaccatgtccagcttttrcaatatcatattgagagccttaactgtaaccaaataacgttttccagtctgtgtttaactatacatcaacccagtggatggttcataaagagtataattgacagctagtaaactcctagcaaaaatgaatcagcttttaacttcatattaaattatccttttctaaaaagactgaaaactataatcaagctctttctgtgtaatttgctatagattactactttaagagaataacatcctttgttaaaaaggctttttatactactggcttgtggtgtcccctcctcccactgaattaaagccttcaacctgctgttgtattccatgagcttttcacctgaacatttttacaatgagagcataatgagtgttgaaactggtatagattatttaaaataggcttagattagctctctattgctgttcttgacctccagggagaggaaaaaaaacatgcttcttagtacagaagtggaatttttatcaaatactttaaagcttaaattatactggtagaggctagactccacagttcattttttttatttctttagtccacttatcagatgagcaaatatgaatactgtgacggttatgatgtacctacaatagaaacaatagaaaatagcataataatcaatattttacatagaataattaggagcttaaaattgcttatttaatgatttatcaaaaatagtactaaactattatagagtgttgaaaaatgtgttcaggtttgctcacttcatggaatttatggaattatggttcagatgtttattataattctttttatagatgctgaaaagttcaacaccaattcctcactttaaaaagcacactcctgctgctgcttctacttttatatttcacactactccctaaatctattctggctctaggtaggtttaaagcctttcatcagcacgtggaacattctctaagataggccatatgatagaccacaaaacaagtctcaataaatttaagaaaattgaaatcatatcaattatcttctcagaccacagtggaataaaactggaaattaacttcaaaaggaaccctcaaaactatacaaataaatggagattaaataataactgaatgatctttgggttaataacgaactcaaggtggaaattaaaaaattatttgaattcaacaataatagtgacacaacttatcaaaacctctgggatacagcaaaagcggtgctaagaggaaagttcatagcattaaatgtctacatcaaaaagtctgaaagagcacaaatagataacctaatgtcacacctcaaagaactagagaaacaagaacaaactaaacccaaacccaacagaaggaaagaaacagcaaagaccagagcagaactaaataaaattgaaaccaaaaaaatacaaaagataaatgaaacaaaaagctggttatttgaaaagataaccaaaattgatatatcattagcgagattaaccaagaaaagaagatgatgcaaataagctcaattagaaaggaaacaggaaatatgacaaccgatatcacagaaatgcaaaagatcattcaaggctactatgaatacctttatgtgcacaaactataaaatctagaggaggtggataaattcctggaaatatacaaccctcctagaataaaccaggaagaaatagaaactctgaatagaccaataacaagcagtgagagtaaatcagtaataaaaaaattaccaagaaaaaatgtctaagaccatgtggattcacagctgaattctatcagacattcaaagaaaaattggtatcagtcctactgaaactattccaaagataaagagggaatcctccctaagtcattctatgaaaccagtatcaccctaataccaaaatcaggaaagaacataacaaaaagagaaacctacagaccaatatccctgatgaacacagatgcaaaaattctcaacaaaataacagctatccaaatccaacagcgtatcaaaaagataatacatcatgatcaagtgggtttcataccagggatgcagggatggcttaacatatacaagtcaataaatgtgatacatcacataaacagaattaaaaacaaaaatcatatgatcatcttgatagatgtagaaaaagcatttgacaaaatctggcatccctttatgataaaaccctgcataaaactggtatagaagggatgtaactcaaagtaataaaagccatctatgtaaaacccacagccaacatcatattgaatgggggaaaagttgaaagcattctccctgagaactggcacaagacaagatgcccactttcgccactcctattcaacacagtaatggaagtcctagccagagcagttaaacaagagaaaaaaataaaaagcatccmaattggaaaagaggaagccaaactgccgctgtttgctgatgaaatgattgtatacctagaaaaccctaaagattcatccaaaaactccttgatttgataaacaaattcagtaaaatttctggatacaaaaatcagtgtacacaaatcaatggcactgctatatagcaacaatgatcaagctgagaataacatcaagaactcaatcccttttacagcagctaccaataaagtaaaataaaataaaatacataggactaaacaaaggagatgaaatatctctacaaggaaaactgcaaaacactgctggaagatattataagtgacacaaacaaatggaaacacccatgctcatggatgggtagaaccaatattgtgaaaatgaccatactgccaaaagcaagctacagagtcaactcagttctcatcaaaatactgatgtgggttgggggggaatctctcaagatggccaaatagtaacagctccagtctgcagctcccagtgagatcaatgcagaaggcgggtgatttctgcatttccaactgaggtacccggctcatctcattgggactggttagacagtgggtgcagcccctggagggcaagcagaaacagggtggggcattgcctcacccgggaagctcaaggggtcggggaactccctcccctagccaagggaagccatgagggactgtgccgtgagggacggtgcactctggcccagatactacgcttttctcatcgtcttcacaacccacagaccaggatattcccttgggtgcctacaccaccagagccctgggtttcaagcacaaaactgggcagccatttgggcagacaccgagctagctgcaggaattttttttcatgccacagtggtgcttggaatgccagagagacagaaccattcactcccctggaaaaggggctgaagccagggagccaagtggtctagttcagtggatcccacctccacagagcccagcaagctaagatccactggcttgaaattcttgctgccaggagagcagtctgaagttgacatgggacactggacttggtggggggagtggcatctgccattactgaggtttgagtaagcggttttcccctcacagtgtgtaacaaagcctgggggaagttccaatggggcggaggcctccacagctctgcaaagccactgtagccagattgcctccctaaattcctcctctctgggcagggcatctctgaaaaaaaggcagcagacccagtcagggtcttataggtaaaacccccatctccctgggactcagcaccagggggaaggggtggctgtgggcatagctttaggagacttaaacgttccttcctgatggaactgaagagagcagcaaatctcctagcacagcattcaagctccactaagggtcagactgcctccataagtgtaagggagctccgctaagggtcagactgcctcctgacccctgtatctcctgactgggagacacctcccagcaggggccaacagacacctcatacaggagagctctggctggcatctgacaggtgcccctctgggacaaagcttccagaggaagaaacaggcagctatctttactgttccgtagcctctgctggtacccaggcaaaacagggtctggagcggayctccagcaaactccagcagacctgcagcagaggggcctgattgttagaaagaaaactaacaaaaagagaggaaaagcatcaacatcaaggaaaaggacatccactcagaaaccccatctgaaggtcaccaacatgaaagaacaaaggtagataaatccatgaagatggggagaaaccagagcaaaaaggctgaaaattgcaaaaactggaatgccgaatgcctcttcttattcaaaggatcacaactccttactggcaagggaacaaaastggatggagaatgagtttgatgaattcacagaagtaggcttcaaaaggtgggtaataacaatctcctgcgaactaaaggatcatgttctaacccaatgcaaggaagctaagaatcttgaaaaaaggttagaggaattgctaagtggaataaccagttkagagaagaacataaatgacctgatggaactgaaaaacacagcacgagaacttcgtgaagcatacacaagtatcaatagccaaatcaatcaagcggaagaacgggtatcagagattgaagatcaacttaatgaaataaagcatgaagagaagattagagaaaaaagaatgaaaaggaacaaaccaagtttccaagcaatatgggactgtgtgaaaagaccaaacctatgtttgattggtgtacctgaaagtgacaaggagaatggaaccaagttggaaaacacacttaaggatattatccaggagaaattccccaacctagcaagacaggccaacattcaaattcaggaaatacagagaacaccacaaagatacaccttgagaagagcaaccccaagacacataattttcagattcaccaagattgaaatgaaggataaaatgttaagggaagccagagagaaaggttgcattacccacaaagggaagcccatcagactaacagtggatctctctgcagaaaccctacaatccagaagagggtgggggccaatattcaacattcttaagaaaagaattttcaacctagaatttcatatctagccaaactaagcttcataattcaaggataaataaaatcctttacagacaagcaaatgctgagagatttttgttaccaccagacctgccttacgagagctcctgaacgaagtactaaacatggaaaggaaaaaccagcaccagccactgcaaatcataccaaattgtaaagaccatcaacactatgaagaaactgcatcaactaacgggcaaaataacacagctagcatcataatgccaggatcaaattcacacataacaatattaaccttaaatgtaaacaggttaaatgccccaattaaaagacacaggctgacaaattggataaagagtcaagacccatcagtgtgctgtattcaggagacccatcttatgtgcaaaaacacgcataggctcaaaataaagggatagaggaatattttccaagcaaatggaaagcaaaaaaaaaaaaaaaggaggggtcgcaatcctggtttctgataaaacagactttaaaccaacaaagatcaaaagacacgaagggcattacataatggtaaaggtatcaatgcaacaagaagagctaactatcctaaatgtatatgcacccaatacaggagcacycagattcataaaggaagttcttggagaccttcaaagagacttagactcccacatagtaatagtgggagactttaacaccccactgtcaatattagattggtgagatggaaaattagcaaggatattcaggacttgaacttagctctgcaccaagtggacctaatagacatctacagaactgtccccccaaatcaacagaatacacattcttctcagcaccacgttgcacttactctaaaattgatcacataattggaagtaaaacactcctcagcaaatgcaaaagaacggaaatcataacagtctctcagaccacagtgcaatcaaattagaactcaggattaagaaactcactgaaagtcgcacaactacatggaaactgaacaatctcctcctgagtgactactgggtacataatgaaattaaggcagaaataaataagttcattgaaacccaggagaacaaagacacaatgtaccagaatatctgggacacagctaaagcagtgtttagagggaaatttatagcactaaatgcccacaagagaaagcaggaaagatctaaaattggcatcctaacatcacaattaaaagaactagagaagcaacagcaaataaattcaaaagctagcagaagacaagaaataactacaatcagagtagaactgaaggagacagagacacgaaaaaccctcgaaaaaaataaatgaatccaggatatggttttttggacagatcaacaaaatagatagaccactagccagactaacaaagcagaaaagagagaagaatcaaaagacacaataaaaatgataaagggggtatcaccactgatcccacagaaatacaaactaccatcagagaatactgtaaacacctctacgcaaataaactagaaaatctagaagaaatggataaattcctggacacatacaccctcccaagactaaaccaggaagaagtcaaatccctgaatagaccaataacaagttctgaaattgaggcagtaattaattgcctaccaaccaaaaaaagcctaggaccagacggactcacagccgaattctacgagaggtacaaagaccattccttccgaaactattccaaacaatagaaaaagagggaatcctccctaactcattttatgaggccaacatcatcctgataccaaaatctggcagagacacaaccaaaaaagaaaatttcaggccagtatgcctgatgaacatcgatgcgaaaatcctcaataaaataatgacaaaccaaatccagcaacacatcaaaaagctcaaccaccacaatcaagtcagcttcatccatgggttgcaaggctggttcaacatacacgaatcaataaacgtaatccattacataaacaaaaccaatgacaaaaccacatgattatgtcaatagatccagaaaaggcttttgacaaaattcaacacctcttcatgctaaaaactcttaataaactaggtattgatggaaagtatctcaaaataataagagctatttataacaaacccacagccaatatcatactgaatgggcaaaagctggaagcattccctttgaaaactggcacaggacaagaatgccctctctcaccacttctattcaacataatattggaagtgctggccagggcaatcaggcaagagaaagaaataaagggtattcaaataggaagagaagaagtcaaattgtctctgtttgcatatgacatgattgtatatttagaaaaccccatcatctcaacccgaaatctccttaagctgataagcaacttcagcaaagtctcaggatacaaaatcaatgtgcaaaaatcacaagcatttctatacaccaataatagaccaacagagaggcaaaccatgagtgaatttacattcacaattgctacaaagaaaataaaatacctaagactctaacttaacaagggatgtgaaggacctcttcaaggagaactacaaaccactgctcaaggaaatgagagagaagacaaacaaatggaaaaacattccatgttcatggataagaagaagaaccaatatcatgaaaatggccatactgcccaaagtaatttatagattcactgctatccccatcaagctactattgactttcttcagagaattagaaaaaactactttaaatttcacatggaaccaaaaatagtccrtatagtcaagacaatcttaagcaaaaagaacaaagctggagggatcacgctacctgacttcaaactatactacaagtctacagtaaccaaaacagcatggttctggtaccaaaacagatatatagaccaatggaacagaacagaggcctcagaaatcactccacacgtctgcaaccatctggactctgacaaacccaagaaaaagaagmaatggggaaaagattccctatttaataaatggtgttgggaaaactggctagccatatgtagaaaaccttttacaaaaattaactcaagatggattaaagacttaaacctaagacctaaaaccataaaaaccctagaggaaaacctaggcagtaccattcaggacagaggcatgggcagagacttcatgagtaaaacaccaaaagcaatggcaacaaaagccaccattgacaaatgggatctaattaaactaaagagcttctgcacaacaaaagaaactatcagagtgaacatgcaacctccagaatgcgagaaaatttttgcaatctatccatctgacaaagggctaatatctagaatctgcaaagtacttaaacttatttataagaacaaaacagccccatcaaaaagtgggaaaaagatttgaacagacacttctcaatagaagatattgatgcaaccaataaacatgaaaaaagctcatcatcagtggtcattagagaaatgcaaatcaaaaccacaatgagataccatctcataccagttagaatggcaatcattaaaaagtcaggaaataacagatgstggagagaatgtggagacataggaatgcttttacactgttgrtggagtgtaaattagttccmccattgtggaagacagtgtggcaattcctagaaactagaaaaccatttgacccagcaatcccatcactgggtatatacccaaaggattataaatcattctactataaagacacatgcacacatatgtttattgcagcactgttcacaatagcaaagacttggaaccaacccaaatgcccatcagtgatagactggatagggatgggagcaaagaaattctaggcagaaaagggatggggtttctggtgaaaaccccactctcaagttgaaaarcctgaaactgtgaggacttacatccctattttcctgcttgaatgttgccttttcctaaaacacccatggccccaccccaccccatcctctgcccgtaaaaaccccagactcagctggtagatgggactacggctggatgttggagagaagcagcttgacttcagagggacagcttgatggygtaacttcgaagaagaatcagatcagagacggctggacttgagggaaagattacctacctgccccatcccctttttgtctccccttcctgcggagagccactttgatcagcagtaaaatcgcccacagttaccatgcttcagttcattcatgtgatctcatttttcttggacactggacaaaagctcrggatccattagtgtagatacaaaaggcwgtcacactagttcattgccttcactggcagagggcagctgcctcatgcgaaaaggcaaagggcccactgagctgttaacacttaagtcatctgtggacagcagcgttaaaagagcactgaagcctctggggcttcaggagtggcaggcaatcctgcctggatgctgctgtggggcttcatggagtttgcccctgcctgtgctaaagcatctagctggttccagcacccactcacctgtgtgctccctcctgcaaggagtggaacacagcaagtcttgagtgagtggagtttgatcccgctgtcactgaagtggctagccctttccagtgcttgttgactccagttcccgcacctgtttgcttgtgctccctcccttgaggagttgagagtggcgggctaagtaaacaaggcacccctgttgagagtctcatgaaggggtcagggaaatatcctgcttcaataccatcatcattcttcacagaagttagaaaaaaaaaatttaaattcatatggaaccaaaaaaaaagcctgaatagcccaagcaatactaagcaaaaagaacaaatctggaggcatcacattaccatgcttcaaattatactacaagtctctagttaccaaaacggcatggtactggtataaaaatagacacatagaacaatgaaacataatagagaactcagaaataaagccaaatacagccaactgagcttagacaaagcatataaatacataaagtgggggaaggacaccctattcaataaatggtgctgggataactggtaagccacatgtagaagaatgaaagtggatcctcatctttcaccttatttaaaaatcaactcaacatgtatcaaagacttaaatctaagacctgaaaccataagcattctggaaaataacaacagaaaaactcttytagacrttggcttcagccaagaatttgtgactaacaactcaaaagcaaatgcaacaaaaacaaaaataaacaaatgggacctaattaaactaaaaagcttcggcacagcaagagaaataattagcagagtaaacagacaacccacagaatgggagaaaatatttgcaaactgtgcatctgacaaaggactaatatccagaatctacaaggaactccaacaaatcagccagaaagaaataattccatcaaaaactgggcaaaggacaagaatagatgattcttaaaagaagatatacaaacaacgaacaaacatatgaaaaaatgctcaacctcactacttatcagagaaatgcaaattaaaaccataatgagatataagaatggccataatttaaaaaattaaaaaataatagatgttggtatggttgtgatgaaaagggaattcttttatgctgcttgtgggaatgtaaactagtacaaccactatggaaaatagtatggagattctctaaagaactaaaagtagatctaccatttgatccggcaatcccactactgggtatttacctaatggaaaagaagtcattatatgaaaagacacttgcacatgcatgtttatagcagcataatttgcgattgtaaaaatacagaaccaatataaatgcccatcagccaatgagtggataaagaaaatgtgctatgtatacactgggaatacaactcagccataaaatggaatgaaataatggcctttgcagcaatttggagttggcagccattattctaagtgaagtaactcaggaatggaaaatcaaatactgtatattctaacttgtaagtaggagctatcaggatgcaaaggcatgagagtgatataatggactttggggacgtggagggatggctgggagggtgtgggtgataaaagatgacatattgggtacagtgtacactgctcaggtgacaagtgcaccaaaatctcagaaatcaccgctgaagaacttacccatgtaactaaacaccacctgttcccaaaaaactattaaatttagaatacaaaaaaaataaaaaataaaaaacacacttaataaaatagtaattgttaaacaattcattaggtgtagataaaacatttagactacagataaggtcagcataatacttagtggttaaataagagaggcattcctattaagtttccaaacaaggcaaggatcccactgtgttcattgctgtttaatattacattggagataatagccaatgaaatcaaacaaggaaaaatagaggcttaagaattacacataagaaggtgaaactacctctttacagatgatactagaaaatccaaacaatcaatgagaaaacaaacacagtaaaataattcaaataagatagcagawtataaaattaacatacaaaagtcaaaagccaggtgtagtggtgtgtatctgtagtcccaaactactcgttagactgaggtaggaggatctcttgatcgcaagagtttgagtctacctgggtgagatagcaagaccccgtctcttaaaaaattaaggaaacccttaaacttctcctggagggcccacaagtagacttgaacaaatggatagttataatttgttctttgataggacaactcattatcataaaaatatcagctatcttcaaattaataaatttaattcaatactaataaaagtgacaaagttttactttgagcttgatgatttgattctaatatccacatataaaataaacstacaaaaataggaagacctgacagtagaagagtaatggggaaattgctttttccaatatgcacactctagagcctctgtaatgaaatagtgggtgctggcatacgaattggtcatcagagaaaaaaaatcaggacatagacccaagaacacatggaaattcactgtaataaaagtggcttctcaaatcagtgggaaatgatagacttaaaaaaattaatagactatgtttgattgtggtaaaatccatactacataaaatttgccatctgaactattttttaaggtatacagttcactagtgttttgtcatattgttgtgcaaccattctccagaactcttttcaccttgctaacctgattctgtacccattaactaactcccagcacctccccatcccccagccaccggaaactatcattctactttgtgcctctcattttgactactctaggtatcccatataaggagaatcatacaatatttatcwttttgtgactggcttatttcacttagggtaatgtccttaaggttcatgcatgtggcatgtcagaatttccttcctttgtaaggatgaataatgttccattgtatgtgtatgtaccacattttgtctgtccatttatttatcagtagactcttgggttgcttctactttttggctgtgatgaatgattctgcaatgaacatgggtatacagatttctcaggaccatgctttgaattctttttgatatatactcaaatggaatgcaggatcatagggtaattctattttaaactttttgagggacttccatactctttaccacagagactataatattttacattctcaccaatagtgtgaaagggttccggtttctccacatcatcatcaacacttattattttctttttttttttttgatattagctattccagtgggcatgaggtgatatctgattgggttttgatttgcgtttccctaatgattaatgatgtttggcatctttttatattctttttggccatttgtatatcttctttggaggaatgtctattcaagtcctttggctattttataattggattttttgttattgttgatttttaggacttcttcatatgttctgtatattaactctttattagatacatgatttgtaagtattttctctcattctatgggttgccttttcactttgttgattgtgacttttgatacaaataatttttatattttgatgtaatccattttatctatttttattgttgttaccagtgattttagtgtcatagccaagaaatcaatgccaaatccaatgtcatgatgagtgatacagtttcacctctttcatttgggtctttgatacattttgagttaatttttgattatgatataaggcaagagtgaaaattcattatttttgcacgtggatatccagtttattcagtaccgtttgttgaaaagactgttcttttaccactgaatgtttttgacacacwtgtcagaaattactcaatcatatatgccagggtttacttctgggctctctattctgtttcattactctgtctgtgtttatgccagtactacattgttttagtttgattttattttttaagaagtttcaagtttacagaaataatcaaatgaaatgtatagagttcctatatattccttctccccaccagttttcctttgttcttaaaatcttgaatttgtgtagtgtatttgttgtaattgcataggcaatattgagagattactgttaatgaaggtycatagtttacattaggattcactgtttgtattgtatatgctatggggtttgacaagtatgtaaggacatgtgtctagcattacagtatcatacataaaacaagttttactgctctaaaaatcttctgtgctctgcttattcacccttttgtcccactaatctctggcaaccactaatctgctttctgtctccatagttttggcttttccagaatgtcatattgttggaatcatacagtgtatagtcttttcagattggcttctttcactgagcaataagcatttaaggttcctctgtgttttttggtggcttgatggcccatttctttttatttgaaaagwtagacttttaataagttgtgttggaacacctagataatcatttggtaaatatgaagtaggagacatactgtacaccgtacaccatcataaaatccagatgggtcagacatctaattgtagaaaaaaagaaaagaaaaatcaagaaaaaaagtgaagccagataaatactaaaataaaatgtgggtaaattcacttataaattggatataaagaaagcctttctataactcaaaaccaagatgaaataaaagaaaagattgacaggtttgccagtggcaacataaaaactttcaagaaaaagtttttatgyatgaagaaaactaccataagcaaaaccaaaagacaaatcataaactgggaataaatgtttacaacacatcatatataaagggataatctacctaatattaaaggattcttaaaaatcagagaacacaggagaaacttaagagacaaagggataaaacagggacagagagctcatgtaaatcggtacgcaaatggcttttagacctatgagaaggtgttcaagttcacttataataggagaaatgcaaattagaatggcactatgtaactaaactcaggtctgagccacttgaaaaccaaaaactcaagagacaagttttggtgaatggaaagttagtttttttttccaagaagccagcaactccaggaagtcagtgaactagcgtttgaagaccgcctttctaagttgtgaatctagatcaggagtttttaagggaaataggggaaatgatgatcagagcattcttgtgaacatgcatagtatcaggtggctgttaatcattgctttttcttggtgaaagtcttgtggcctcctacaggctattcttaacaggctggtcagcccattcccagcgctgctggtattttcttttatctttcttgaacatcctgttttcctgaggctgtattagatgaataatctacaaactcatgcaaaataataattacattcaagcaagcaagctttttctaacatggagtcagtagataccattaacctaatagatcagaaaacatttaaaatcttggtgaattctcttggtaaagacaagggcaaaaagagcccttaagtacctggctggtgtgagtgcccgagggtcccactcyatggagagagatttggcagtgtctaagaatgagacctccactgactgtcagtgcccacccctgccctctgtgctctgcatctttccatgttccagggtgaattttcgtgctagaaccgtgtaagtttcctctgcccaccagcttgtaggctggaattcacattctctgggagaagctctcaaccagtggctctcctgttgctgttattcctcaggaggcatgattttgaggcatgttccttgcgccacttccagcgtttcccttcgggattctgagaccctgtcccctgggggcgcgggctgggagagcaccctttttgtctgccttttcctcctgtgttacctcctcgccttcctatactccctgcatttccctcataagcaacttgcactcttttccttgttacaagttctgcttctgaagcttccttacaaatatctttcagtgattgaaattgaaattagtgttctgtgcctccaggccctgctcccaacaccctctaaaagtgacctgctctgaattcctaatgatttaccatttctggaaacttaactcacatatcttctatgtactccctagtaatttcctttttttttttaatgtgaggtgtaaactcctggaggagaaaaagtgtgattctcaagggtcaggtgtcgtgtcttgcatatagttgtcacttagtacatttgttgaatggaaagtagtaacacttttctaattttttctcaaaattcttgtatacactgatgtgatatttataaagcttctttcttcttatgtgttttctttttcatctgttacacaaagacaatcatgatcgtttctgttgttgaaaaagtgtgactttaaccattttttcctcacttctcatttaaaaataaaaaatttacagcaacatggacctagtaaaacctgatttaacctagaccaaacctacaagaaaatatggctcttgacaagtagtaactgtcttaaaaagaaggcggattcatttaaaccattagcacacctgtaggttgctggtacccggcattatccctacaacattggttttctgtaagatcgattacttgaccttgcctgaaaagattttttcagaatctagctgtgaacctgttattattgttttaaccccaatatgggtacataaaatggatacaattcccagtggtcagaggacatacactggaatacatttagcaggaaggctgtagcagagcgattagcagagattaagaaagtagtattaaagatttggtggctgttcctcgtatattcatatattcaaaataaactttaaaatgtgtagggcagtgggactctgactcataatkttagttttaaactaattactcttatagtagtgctgttccctttattgaaaaataagtgttgtattacaatgttcaggctctttgtctttatacacataccagttacataaacgggtagtattttctaattgtatttgaccctaggactcaacagatgcaaatggtttatttgcattccatctatggcagctagttcagaaacttattcaactttctcctgaattggcagagacaaagggtcttcagtagtgacacagttcattctggttattcaccacatctaaatgatggacatctaaatgatggactgtcatatttatcctgtccctaaatctcattttctcattcttctaagtgttgatatttgggtctccctactgaaattgtacagagtatcatttttggggggtccttttgtaaggcaacttttttgagatataatccacacattgtacagttcactgacttaacagatgagcattcccagttctccatatttttgccagtgcttgttattgtccatattttttgttctagccaccccartgggtatgaggtggtgatagggacaggaggcagggaaattctgggcagaaaaggacgggtccctggtgaagtccctatcctcaagccaaagagcctggaactgcagcccaaagtgagaacttatgctcctgttttctgctccaatgttgccttttccaaaaccacccatggccctgcccccaacccccatcctgtgcctataaaaaccccagagctctgccagcagaggggagaagcagctggacatcggagactatggttggatgtcggaaagaagcagcttaacctcggagggacagtttgatgatgttgctttggagaggattctggccaggacggctggactccaagggaacattaccttcctgccctgtccctttttcatctccccttcgcgctgagagccactttcaccaggaataaaatcccttgcatttactgtcttcagttcgttcgtgtgacctcattccttctggacgccagagaagaacttgggtgccacaagtgtgggtgcaaacggttgtcacactgaccgtccactgagctgttaacacttaagccatccacagacagcaaagctaaaagggcactgttgcacttcctctggggcttcggatcacgggcactgtaccctaaaccctgctgcagggccagtacagagttcgctcttgctcctccccaaaagcgctcgccccagctcctgcacctgttcacatgcactccccctcctgtgaggtttggagcagtcagtgagtagaattcgcccctgccagcaccagcacgagtgcactccatttcccgcctgtgaaggggtcagggaaataatctgcttctgtggtacttgtggatttgagttacatttctctaacgactaatgatgagcatctttttttgttcatggtggtcatttacatatcttctttcaaaaacgttttcagatcttttcagatcctttgctyatttttaattgggtcatttcttgttgagttttaagatttctttatagattctggttaaaagtcgcttatcagataatatgatttacaaatacattctcctatcctgtgcgttgttaataatatcattttatatttaattttttaagctctcatagaaggattactaatcttttacttgcacacttctggtacccagaagktcttcagtagaggtttatgaataaatgagtggtgtatctttacctcccttctcaactactaaccaaactaaatatgcttagttcctcagttgagcctcatattttgccatctctcaatctctcaagagtgagaatgaccattctttggaagtctgttgatgtaccattgtgccttattgcagaatggtgttccaaactggactgtaatgtgacttccctattttgggtacattgagggtatcagttcctttgaacttgatactgcttttctatttattcaacttaagatttcatgactttttaatgcaactctgttattattttgcaaatcagtgaactattgttatattccrtggaataatagatcaaagtcagagaaagtgcgtaagtgaaaaatagaggatatcagccttgacagcagttcatagaaaaagacctgggctttttagttaactaattttatataattcagtggtaagacaaacttcaatagttttgttgttctttgaagtttcttggtggttttatttttaatgaagttcttcctgtcaattagagctgtgaaataatggaacgggtgacttgaaaagtaatgacttccctgtcaccaacattatttaagtagaggctgggtgactaacagggatattgtaagaaggggctcttgaatggagggtccatgactgagtaacccatgagaccagcttctttcacctctaattttgtgatctaaggatcacctctgccaagatccttaggagaaaaggtcagttttttgtgtacacatgcattatattttcagtttattttctcatcaagcagatgcctttaaccttgaaaggctgctttatttcttcattgaattattttggcttataaggaaaatatgtctgtagtactaatcattaatgattttaagtgtatatactcagataaatttttgcttagttgtgcattcccacttttttttgtcatgaagtttcacagctgtatttagtaaaatcttttgagagacagccaagtaactgatttttttgtggcaagccaatggcatgtcaaatttggatttatgttggaaagctgttttgcagacataaaagttgaaataaacagccaaattatcatttctcccaaatttggatgtgggaaagtgaatatgtgtttggcttttatttctggaataacttgagaatggataaataggttttcctgtgtgctgtattaaacgtgtgcaattttgcagcaagtccaaatgtgagaaatttaatcccaaagaattatgttaagtgtttgaaaaacatctattacttgggatcatctcctgtgtgccaggcactaggccaggtgctttacaaatgttatctcatgtaatccccaaaatagaactgtggttttataatcatttctgttacaggcactaaaatcaagggcatcacagtttaaggtaatttgctcaaggtcacagaatcagtaagtatgaattacaaatttgggattcggacccaaatcttcttgtctctggtctctggcctattctttgaaggcttccccaagttcttcaagttttacttatttttgtgctgtaataggaaattataagtaaggttcagatatttgttatttaataatgtgacttctgattcatacttaacagtatttcagtatgtttaattctggttttgtataatgatttaaaatccaaaatagcagtgatgcaggattttgactccttagttcagctaaatctgggttcttatctcatgaccagaaagaattaagcacatggacacattgaagggtgaggagggtggaatttattaacctctaaaggaaagctctcagcaaagaaaagggtcctgcaagaaggtttccacctcacaaattgaataccagggccaccatacaggagctgaagaggctacgctcctccctgcataaggcgcaaattcctgatggctccgcccagttccctcagggcacatgtgggcatgcccaggcaagccataggtagtattggaaaagacaacattccattggttaaaaggcattattcagaaagaatcaattaggaaagggcaggcaaactggggcagatgttctccctttgggtcttgggtttcatctgagaccagcagtccggtcttcagcctycaggctgttttaggcttgaaggtgaggtttcaccagggacccttccctatctgcctaggcatttgtctgcctcctgcctctatcagcagcatttctctattataattgttaggaacagaaataattaatctgtgtcctagactatttgtaaactctacctcaatgtaaatgtagttttataattaaaatgaaggatcatcaagaatctagctattacttttttttgaaaattaattttcctccaaccttttttttttttttttgagatgcagtttctctctattgtcaaggctagagtacaggcccactgcagtcttgaattcctggcctcaagcaatcctcctgcctcagcctcctgagtagctgggcccacagttgtgcaccaccacactgggctaatttttaaattttttgtagagacaggatctagctttgttacccaggctggtctcaaactcgtgggctcaaatgtcctcctgcctcagcctctcaaaatgctgggattatagatgtgagcccacactggccccctccaactttttatgggaggtgttcctgaatggaatggcttggcctttgttgtacatcaaggtaataaataaatggtcctcacttatggcttaactttattttccccaaggatttggcacaggtgttgtgtgaccctgattcagggtttgtggaaccccctctgggtagtgaaatagatgatcttctcaagatagattatacaatcatgccttaggctggtctttgagtgttatattatctcttcctggctcttttaattttctgctacagacagaacttccattgtatttaaaatagcatttattttatartaaggctgaaaaaaaaacagtacaaaagacttagaagaatatagtcaaggtagagttgatgtcaaatggaaatggtaacattcatttaagtagagcaattaaaaatggccttggggctcttagttttacttgccatattgtcagttctggagccactggtaggtattttgtccttatcatttcaaagcacacagttgaatttattacttcagttattatcctcagttacttctattttttaggatacttttaacttgaaggattaaaaaaaactaatcatatagaaccatctaaagccaacataaatttaaatcttagtctcatttttatcttaatgataaaataatgaattaaagcttttatacattccgtgttgaagttgtctctagtgtattcatgattgaaaaatatactctacatgtactttcaggcttatatgaaatacttttcaagtatcaaatatttatggaaaaaaaatctgcgttggctctgaatctgttacacctagagcctcactgtaacactgtccttgggttctgtaatgattaacatttggcacttaagtaataaaaccagttttacaagggccaaaatggacccttgtaaatgaaagtggcctctaaacatactaaaatgcatgataactttaacaaatctttaattctagattctttagagggtgtcaccataggatgattgatgctgaaaatgagctatgtcatgttcactttttctctgttacgtactggatgcttatttatttagaaatttggtgcataaattgttgtctgacactgtttgaatatttaatggccagtcatttctatgttacccctaaggatgtcttcctttacttttagagttcctrtggttcctcctcaagttatgaattagtgttttcatgaggtagcagagaagtgtccatattaccttaaagcacacataattagaaacataaatgcactgaatacacttagcactcaacaaacacctgtattgttacctaaaggccaaatgattattcttggattatccacagtgtagctggtctgtatcactcttcattcgaatttagaataggtaattaaaagtcatttatctgtgattgtattgctcagaaacatgaagtatgaaatttctataccagtgcctcatagtaaattctttccctaaagacaagtaattatggatccagaaacatttttccttcactgaggagaggggtgattaaaaagctcacttcgaagtccaaaatactgcagatttgttgagacagttttgtttccctgacatgttgattgcacttcacatcacacacaataccgagggacttattctgtaaggtttctggccttcccctttatcataattgcagagtgtcacattgatctgatggagatggatttagaacagttgttgattggaagctcttgataaagacagggagttcaaacacagactctgcctggaaattcagcgtgaacatccctcatctatcataatttaaccgatgagaaagatcaagttaacctgccatccatcatatctatttaactgtactccagagtgaattaaattgtatttaacaacttttatcttacagggtttgcacactgaaagagaacagcacttcttcatcaagttgttgctctctgtttatcaatttaagattttgaaacttgttctaaaacattcaatatccagtaaattcctttcaaagactttatggtccttaattttcccccaagttttgttcttactggtaataatcaatatcagtttagtactatagcaatggagaagtattcttaggatgcaatggtataaaatagtatcttatccttgaaaatagacgtgctcaattgaaataagcttggttggtattkcaagtattaatttggagtactttcagacattttaagaggtatcgttttagggccatagaatagtagagttaggagggcacctgaagatctaatttaatcctttagtttgcagctaaggaaactgggctctaagggtacatgactgtcataacaaggccatctaagttatctgcaatagtgctgggataaacatgcaggatttctgactcctggaatagcttttctttgatcctaccatgtatctttatgtacagattctatgtggattctctgaaactcatgtcttatcagtatcttttaggattaagggagaggggaaagataaccatggcacgaaataatataacagacccttaaaacttgataccatcaattttgagttacaagaggaaataaatggggaaagtaagggaaaggagatcactctctgttcttgcttttctccaacctactaacattagagaactgataaaaaatttattcatagactttgctgatcaaattgttatgtgttgccatcttgaataatttgtacatctgcagaagcaagaaaaaattaagttttctttttggagagcaagaaaattcaataagaaaacattttctaacgtcttgatagaaattattggtataaaaacttaggtctttagttaggatttgatccagcccaagatggaaaacacaaaataagaatggtgtaagcaagtagaatttatttttcctttaaaggaaaaggmgtacacaggttccttctttgccttctctgtcttcctaatgtggcaatgaaggttcaacataccttccccagccctggccatcacatcctcagctagcctgaaggggtgagtgatgaacagtagggcgaggggaagggccagtatgagctggcttcgaaggtggtgtcttaagcagccacatgatacttctacttccatttcattttcattgatcagaacttagttatgagaatacctattgcttcaaggaagactggaatattcagtctgtattctgggtagccaggagtccagctaaaatcaggattgtgttactttatttgatcttaataaattataatatttgattttttatttttaaaaatattactttttttagagacagggtcttgctctgttgttgctcaggctggagtgcaatgacatgatcatagctcactgcagcctttgccttctggtctcaagtgatcctcccaccttggtctcatgagtagctggaactacaggtatgcacccccatgcctggctaatttttgaaattgttgtaggaacggagtctcactattgcccaggctggtctcgaactcctggtctcaagtggtcctcccaccttggcttccaaaaacgctgagatttcaggtgtgagccactgtgcctggcctcacaatatggactcttgagccccataactgaaccgcagaataagaatccctgtgtttatttggaggttcttttccagcaagcttttccagggctccctatgcagccagcttcayatgtttaggaatcattgcactacaatataggctagacatactgatgcaggatttttgctccttagttcagctaaatctgggtttttgtctcatgaccaggaaaaattaggcatgtagacacattgaagggtgaggagggtacaatttatttattttacttattttgtattttaagttccgggatacatgtaccgaatgtgcaggtttgttacataggtgtacatgcgccatggtggtttgctgcacctatcaacccatcatctaggttttaagccccacatgcattaggtatttgtcctaatgctcccttttccctygccccccaccctccaacaggccctggtgtgtgttgttctcctccttggtttccatgtgttctcattgttcagctcccacttataaatgagaacatgtggtgtttggttttctgatcctgttagtttgctgagaatgatggcttccagcttcatccatgtccctgcaaaggacatgatctcattcttttttatggctgcatagtattccatggtgtatatgtgccacattttctttattcagtctatcawtgataggcatttgggctggctccaagtctttgctattgtaaatagtgctgcagtaaacatacgtgtgcatgtgtctttatagtagaatgatttataatcctttgagaatatgcccagtaatgtgattgctgggtcaaatggtatttctggttctagatccttgaggaatcagagcacagaatgtattaagcaaaaggaatgctctcagcaaacagagggtccctgtaagcaggtttccacctcacaaactgaataccagagccaccatgcaggagttgaagaggccaggctcctcccctgcataaggcrcaaattcctggtggctccaccccattcccccagtgcatgtgggcctccagtccactgtgggcatgcccaggcaagccccctgggcaggttctcttttctgcacaaaacatctggtgtaaacccttgtggggcaggttggagattctccgggtacccttccctaatcctaggggatttggctgtctgctgcctctatgactaccttacctaccatagagatgaargttcctcacactaaacatttcacacttatgaaggggtcagaactctcagtatattccaaacctacatccaaaagtaaagctggcacacatcagctttgcattaaatatcttgaagccatttctgagctcactaggacaatgggcccagaggacaaatgagtaatcttcatttcgagtaccacaaaggacgacagagatcaagcaccccaaatctgtatgtgtcaggggcagtggagtgtggaggaggatctacaggaaaagaaggaacatgatggtacattatttctgttgaaagcaaatgagggcacagtgcaaatgccaggcaggcacctgtaatctgtgacatttcagcttttaaatttgattttggcttatctaataaatatgggatctgtttatattattgtgatttcatgtctacttaagagtttaatgttataattaagtccttactagttttgtgagtactaaatcgaagaattgctatcatgtaattctttgaacagataaacatttttgggagagggaaggcaaatctggattctggtagggttgatatttaatatttatcagttatggtttcagaagaagtgaaactgactacagatctattacctatgttaattaaaagaagggagcaaatggcatggaattttactactccttgaaaaagttctactagcattaatgttctagggggtattgctaaattcagttaaaattagtccatggtagcctcgttggcataatagggaaaaagtgaattctccaaagaatgaagctttcaaattcattaggacaaaaaattacctgtcttcctctgggtatttatttttgctacagcttgagctcctctcttagtttcagtgccacttgatagtatggacagataaaactccayggtgggggtcacacacacacacgttaaccaaaaataaaattctaagccctgcaaccaactgaatggatcccccttatggccgaggggattccaaagaaacctgaaaaactagttcaggtcatgaaaggaagtggggaccaggcatgcctcattgtaccttctctcttttggagtttagatacaactgaccagcattaacattaaaacagagatctggctgggcatgatggctcatgcctgtaatctcaacactttgagaggctgaggcaggcagatcacttgaggtcaggagtttgacactggcctggccaacatagtgacaccccatctatactgaaaatacaaaaattagttgagcatggtggygggcggcgcctgtaatcccagctactcgggagactgaggcaggagaayagcttgaacctggaaggtagaagaagttgcagtgagccgagattgtgccactgcattccagcctggccaacagagggagactctgtctcaaaagcaagcaagcaaacaaacaaacattaaaacagagatcttaagactgatagaacatagtctttgtaccaaattccagcctgactctagtataacatcacatgacagataaagaaggaaatagaaatattttaccctaaaatatgtctctaaatatacctaaaaaatatacctaaaaaatttgccatattttgaaatggctcttttcatctataaagaatgtctattaacataactagatctttccccttgcagtccttcccagtcctaaagagattaactaatagtctggcacctttcaaggtcttaaaagaggcatttaccatctattctttctgaagcctgctactgggagtcctcatctaatctacctaacaagaactttggcttccacaacttcccttatcttaaagtcaagcattttttttttttttcctgttgacttcaacttcaggtaaagctgaactcttttaaccaattgccaatcaggaaatctttgaatccttctttgacctgaaagcaccgcctccccccaccccaccctggccaaaatatgtagtattgattgatgccctttgtctccataaaatatgtaaaaccaagctataacctaactacctcaggcatatgttctcaggacctccgaaggctgtgtcacaggtcatggtactcacatttgattcagaataaatctctctgaatattttrtagagtttggctttttttggtcaacactcacatgacttcagggctgagagacaagtgaccttagtcactaagtggctgggcataagaagggtcacaactgcttagctccagrtaggaatataggtctagttttggcagatcttctgagttttcataaatgccaaactctggaatttattttatttatttttattttaattttttttgagatggagtcttgctctgtcacccaggctggagtgcagtggcatgatctcagctcactgcaacctccgccttctgggctcaagcaattctcctgcctcagcctcccaagtagctgggattgtagcaggactagctgcggacaaaacctctcagacaccgagttgtagaaggaagggctttattcagctgggagcatcaggaagctactgccttaaaatccgagctccccgaatgcttaattactgtcccttttaagggctcacaacactaaagatttcacatgaaagggtcgtgattgatttgagcaagcaaggggtacgtgacaggggctgcatgctctggtggtcagagaaaaacagaacagggcagggagtttcacaatgttcttctatacaatgtctggaatctatgaataacatcactttctaaattatgagttgatttttaactactgggtttaggccaggcagggccaggcctggtttcgggcctggcgctgggctgcctgtctttggtcttatttccttgttgttttttcttaaaacaggtactgagtataaaacaatataaaataatatgagaggtctttctcttccttcaggattacaggcttgtgtcaccgtgcccagctaatttttatatttttagtagagatggggttttacatgtttgccaggctggtctcgaactcctgatcttgggtgatccacctgccttggcctcccaaagtgctgggattataggcgtgagccaccacgcccagccccaactctggaattttattttattttattttttatttttttggagacagagtcacactctgtcatccaggctggagtgcagtggcacagtcttggcccactgcaacctccgcctcccaagtagctggtattacaggtgcccgccaccacgcccatctaattttttgtgtttttagtggtgacggggttttaccatgttggctgggctggtcttgaactcctgaccccgtgatccacctgcctcggcctcccaaagtgctgggattacaggcatgagccacagtgcccggccaactctggaatttttaaacggaaacttttttgtctttaaatgttgccagtgaatttgaaacccgtatgtaatcttccgtctacctgtttgtttttcctctgctccatgtaataaggtgtagtttgttcccatagattagacagactccagggcttgtattcaaccagtgtgcatctggctactaaagtgttaaaatacctgtggactgrctggtaagtagccactgcctagtgctagtggtcctggggaatgttgtgtgttcagtgctggggcctgtgccagcccctggtctcctggcctgtctatggcagtttcctgtactagccctgtcttctgtacctttggaccaatgtgggcccaagtcacgatgagaatctggcattctcagcataggggcaatgagacacgctgaaaaccaaaacctggattctgataggctctgctccttctccccaggctgtggctgttggctgctcattggcatatcccagtgttgtctttgtgtggccagttcagggtactgtagctttccctttgattaatgaatataacattcattaaatattttggatttcactctgccatctttaatgcacgcttctcaaagatgctttatcaatatgttttgcccttagagtgatctttttccatagacatagagttttatcattcattcctttgtattgataaggctgcctttcttttgattatattaggttggtgcaaaagtgattgcagttttggaccatgatttttaaatcattataactaggctcaaatacatctttattaatcaaaataggaaccattgcaatcaacacatttttgccaacgagaagtaagtttgtttattcctgtagcataaaaatccrtgcttcgggattcagtgaactcttggaaagcattttctgcattctgctggttgtggaagcgttttccctgcagaaagttgtttagatgcttgaagaagtggaggccagttggcgagaggtcaggtgaatatgttggatgagacaaaatttcatagcccagtttattcaacttttggtttttttttttgagacggagtctcgctctgttgcccaggctggagtgcagtggcacgatctcagctcactgcaagctccgcctcccgggttcatgccattctcctgcctcagcctcccgagtagctgggactataggcgcccgccaccacaccyggctatttttttttttttgtatttttagtagagacggggtttcaccgtgttagccaggatggtctcgatctcctgacctcgagatccacccgcctcggcctcccaaagtgctgggattacaggtgtgagccactgcgcccggccagttcgttcaacttttgaagcattggttgtgtgacatgcagtcaggtgttattgtggataagaattgggccctttctgttggccaatgccggctgcaggtgttgcagtttttggtgtatctcatcgatttgctgagcatactcagatgtaatggttttgccagtattcagaaagctgtaatggatcagactggcagcacaccgccagacagtgaccatgatttttttttggtgcaagtttggctttgggaagtgctttggagcttcttcttggtctagccactgagctggtcattgctgattgtcatataaaaatccacttttctcgtcgcacatcacaatctgatcgagaagtggttcgttgttgcacagaataagagaagatggcactcaaaaatgacagttttttttttctaattttcgctcacctcatgaggcatccatttactgagctttttcccctttccaatttgtttcaaatgccaaaccacagtaaagtggtcgacgttgagttctttgacaacttctcatgtagttgtaagaggatcagctttgatgattgctttcagttggttgttgtcaacttctgatggccagccactatgctgaacttgaataagaaaattgctcaaatttgctttctgtctaacatcatttccataataaacagcaagtagtaagtcattagcatgacaacataaagcgagaaatgtgcattaaaatgatgtataacataaccacatttgtttaaaaatgtattccaatatcaaacagaaaatttcagcaatgcaaaaactgcgattacttttgcaccaaccattttccttttgctttcccattcttcaactttaggataaatggggagtggatacagcaggcaccttgggagtcattggattttcctagtttgtctagtttgtctcttatccgttgtattgccatgttctgctcattaccgtcttatgggcctgctccttggggcttagacagtctccttgcctttgcttctgcggctcttgctgcttagaaaacacttctggttctatcacctatgctggtggggttgcatcatctttgattttctacagctataggtaatgtcttttccttgaacatttaaggaaagtggctccatctgtgtgtctcttagagtatttaccactttgtatttcctgtcctgtattgacgtgaaaaaatgtcttttgtctctacttaaactccaaggctgcaatgtccattacagtctctgttagccacattgtgctgtttaaatttaaactcataaaaattaagtaaaaaatatagttcctcagtggcattagctgcatgtggctggtggggactgtatggaacagtactgaacatttctatcctcagaggaagttctgctgaactgggctgctcccatggcttgagggcattggttggtcctgccaaccccaccctacccctcagctccaagcttgaagcaggcctgtgaccctcctgaattgtagtaggttctattgcagaagaatcagtatagagtagtgggattgacctaaaaggaggaaactgaagcaaaattaacataagtaaagagtttattggggccaagtttgaggattgcaacctgggggcataaatgcaagttgccccgaatatacactctgtatagcagcagttacaagtggatttatttcattttattttatttttagagatgggatctcgctctgtcacaggctggattgcarcggtctgattataggtcactgcagcctgaaactcctgggctgaaatgatcctcctgcttcagcctctccagtagctgggactccaagcatgtgccgccgctcctggctaatttttaaaaatttatgtagagatagaatcttgctatattgcccaggccagtctcaaactcctggcctcaagtgatcctcctgtcttggcctcccaaaatgttggaattacagttgtgagctgtggagccaggccacagtggatttttaaaggcagaaaaaggagacagagtgggcagatgcaaagttgtttgtcaggaattctcattggtttacagaaataacattgattagtgatatggctatacatggttaagctatacggtatgggttatagtgtccagtgtggcattattagattaatttatagctacttttggcaacaggaagctgctttgagagacgaatacatagctgaagcagggagtagggcatgattgagttctcattttaatgcttctctgggcctcacagtttgtaagggctcacattcctcagatgaaagtgctttctttcccccgtggtgtgtgtgtagtgtaaattcttggagcttagctgcttggctctgtgtactggagcaagtactaagttttctgagcctacatttttataatgggtaaacagtcataatgtgtataaataactctttattctgagttcaaaatgagaaaccttctgaaaaatttttagcatagtggtggccatacagtaggtgttccgtgaacatgttctttcatgtgttgtgcacaggtgggcattgctcctgagaatgcaaggtggtaggcggccacctgggtctgtagccggaaggtgacatgcgttttcattgaggccagaggagagtggccttctactctgaaacatttgtcttttcggctgagcaatggcccaaatgacttgcagtttaatccacagacaggatcatttttaaaacatgggcatcaaggaatttatcttcccaagcctggtttttcttgatgatttctaatgaaactttgtatttgttggtcactgatattttcagttaacgaaaacacatcggtattggactttgttttytttatggcttctgtgaagcactgaaggctgtcatttttgacaaaactattgtaactcttaataagttgtctaagctttaaggctgggcaaataaatcttaaggaattttcatcttggtaaggtgcctgtccctctgatgagattagcttcatatttcagggtgttctgttctggaggaaaccaagaatttcttcagtataagtgaaaccttagcactggcttcacctcagcagatgcaggggaaatcagcctctttgtcctgtaattgctttcatcaaattgaagatcccatgggaggaagttttcctgcagggaaattcctgtttatgggaatggctgtgcatccatttgtcaagagctattgttattctgatgtgacaccttccattcctcccagtcctgtaaaaaatatgacatctattagaacctaattacttatgccattaacatgttgttccccactgaaatttcctggagtttgaaggaagacaagatgtgggtgtatgatagatatatttagatatttaaacattggaattacgtgggaaaaggtggtatatggtagcacagtgtaagaaattctatgtagaatttttatcttcctatttttaaggcattatatacagttaaagtcaaattattttaagttacagtgactaaaaaatatgttgacagtttctaataactttaaaaagtagtccaacacagaattttggatgaatggatgccaaaaaatgggctttcagttcattttcttttatggtgactaggctcctgggattttcttcgatctgattgtgcaaaatagttgatgcactggatttttcctatccattcacaagtatcctcccacccattcctccagtcattcagccagccatctggtaatcatttttatttatagtgccaggaaattgggtggataaaaagatgtatatttcagaagtgcagttttatctttttaaggaactcctatctgggcacagtggttcackcttgtaatcccagcgctttggcaggctgaggtgggaggatcacttgagctcaggaattcgagaccagcttggacaacatggaagagaccccagtctctacaaaaagtgaaaaataaataagtatataactcctttggtttgaaggagattctgtaattctgcatagcagatcagagttctggctctgaacacagactccagagcgtacttgaatcctaccagccagaagtatgagaaatagccaaagacagcttgtggtaagcctcaatttagaaaattgtcaatcatttctcttgaaagtaaaaatttaatttaaaaattggaaattaaattggattgatttgcatagattatttacccattagttaggtgctacatgtgctttatctgatttaattttcataacaatgctgtgaaagaagcaatcatattcctgtctgacggatgagaaagaggggccaaacatgcatggctgccacctaaccattaaaggagtctggtcttgggctgaatccattaaagtcccatgcttaagctttaagttgttctcaatagaaaggaaaargtccagtcatccagttctaccacttgctactgcctgtatggccgctgattgtcacttagcttttctttgcctaatttttatcagctaccacaatgggaattaatgcctttcttatcaaatttaatacactgttgtgaggatgtcgtggaataatgtgtgtgaaaatgcttgctacagtgtatcatgttacatacatgaaagttaatattcttatacttattccactgcatttttaaatggagtctttcacaacagtctgagaaattcttctattctagctaatgtcagtgagttgtcaatttgttcctaagtgtttattgggcaattattgtgaaatactgaagtggtggaagtagagacaattacatgacaaattttgaataatatgatattaaaataaaaagagaaagagctgctaaaacctggtattttaataaattagacatatggaactcctgctttatttaagaagtagacatagggctttattagtgcaggattaagcatgtagttggctaatgtcagtgaatttttcttgaatattcgggacataaaacagaaaaggagtttatacgtagtgtaattatttcttacatatgttttggtcagtaagcyggtttatagagaaacctatgcttgttccttaaactgtagattaagaatataggagttattaaaattaataatacttttgtttacataaaagtaggactgcattatttagtagctgttattcagagcttagtgtgctcttttctaagaggcttcatgagtatcccgaaataactgcaaaattcatcaaatggaaatgattaccatgaaatcaggcttctgacttagatttttccrcaattagtgggaaagcatcacacgtggatttatgttatttggacagactggggaaagcctaaaccagactatacattttcaagaattactcagtagagcttcttagagaggtctagtgaaaactaagtaaaatcaggtttgaaaaaattagaccacatatctctacagatttgaggctcaaaaaggccacggtgtgaagaaaactggattctgttacaaaagaatgattagtgtgtttgttttcctgcaagtcataaaggcaagctagtttctcagaatgaatattgagtgctgaggtttttgtcctagggccttgaaaggtggtggaatctaggaaactgaaatggcaggtggaaaaaaaggttcaattattctgtaaagaggcatgtcttcatgaagaatagagtgggagtaaggtagagtaattatcaactatatttgagaaggtcttatataaaagtaaaatactgcaacctacccagcactctcagtgcattttatgaggttctgtttttcctctcatagaatttaagatctatatgattggcttattatgtttattgtttaggttgtctcacttattaaaatatattcctagtgcctagactagtacctggcacatggtaggtaataaatacatatgtattgagtgaataaatgaaccagaggctaggttctttgtggcccttggtctatttgtctgaaaaatgagaactgtattggacacccccaatatttttcccagagccactatgaggataattgtgttcatcgacttttatcttatttttgactgagctggggctgtattgtttgcagttcaaatatattttctcataagaaaaaaacaaaagctaagtgtatttaaattcttaactctagttgagagaccatccaggggatcagagtctgaagtcagaatactagccctgaaccccagcatgccattttctgagtctttctatcacttatgttatagaaaggatgaaatcaaaggaataataatagtggtcaagaaaatcacctctaacttttattgaactgggttcaaatccttagccttttgttagctgatgaccttgggtaagttacccaaattctctaaacattccatcttctctgctgtataattttaataagtggtacttcttagagttgttgcaagggttaaataagataatggaaataagagkgtatcagttcatcagtcaatggcaatacgtctaaccctttaagccaacccttttgctaagaacaatcagaaaacaggaccatatatctggccagctatttgaagtcatgagaggacttctaaagaggagttccatgatccagaaggtccagtgcagtgattcctgcatttggggccacttttttcctcaagactgagtgtctcagcctctcagcctgaactttggtgtaacttgacagtagacatcaaagagcagagctctcagaagactcacaggctctgggagaggcaactaaattgaagtttagggcctgccaaggaagaggtaaatacctcaggcttttggatcccaaaggccacatcttaggtgttagggtgaataggaagtagaccagcttgactcatcacaattactgattagatcaatgtgggatggattgccagtgcccctagcatatgtacttggcagaagacaatcaccattagccaggcatagaagagatggtaaatcagtgaccagaaaccaagagaaaatacagataatagaaacagatataagggcatctagaaaaaggaattgagagacatttgctttaaagtaaccatgattaatatggtaaaggaattgaagacaaggctgagaattttgatatcagttactggaaattataagattgtaaaatagctaaaattttaaaatgatttaaaccgaggattaggcacatatgaaaagtagtgaaaatacagaataaaatatccaaactgagtcaaagagagacaaagatggaaaatacagaaacaaacctatgagacaaatggacatggtgaatataacctaatatggaaatggagtcccagaaaaagaggagagaatagggggataaaggcaatgtctgaagagatgatccttgaaaatttccaaaattgataaaagacattaagcagaaatttgggaaaattacaaatgtttacaagacaaacacaaagaacactatatttaggcacatcatcatcaaatagctgaaaaccaaagacaaagagaaaatgctagaacagccagaaaaaaaaagacatgtaatcttcaaagaagcaacaataagattttcagttgatttctcaacagaaacaatggaatccagaagacaatgacatgatctttttgaagtcctgggagaattctgccaatgtagaattctatatctaatgacgatatccttcaaaaacatgaatataattcagatattttcagatatgtaaatttttgtcaacctagtaaattcttttttttttctttttttcttgagaagaagtctcgctctgtcgcccaagccggagtgtagtggtgcgatcttggctcactgcaacctctgcctcccaggttcaagcaattctcctgcctcagcctcccaagtagctgggactacaagcgtgcaacaccatgcctggctaatttttgtatttttagtagagatagggtttcactatgttggccaggctggtcttgaactcctagtctcatgtgatcttcctgccttgacctcctaaagtgctgggattacaggtgtgagccactgcacctggccccatcatagtcttgacagtaggacagtaagacgcttcctttccacatttctttttaccagccacgtggtggctggatggcgattggttctgtggccagcttgctctctgaagggtggatggaggaaggtgacccagcttcaagtgtacgtgtaccttccagggagagggcagaggtaaagcaggtctctgctactccagggtttctcccggtgtgaactcccagggctgtttctcactctcagtgaaagctttttcctccttttcccagggtgtttcccttctgctttctgttgtttgtggccatgatttttggtcatctttggaatctcagtctcaaagcttttctctggcttttttgatcctagaacaagcataggatctttttaagtttcacttttgttttttaaatgtaacagtatgggacatgtaaggagtcagaacaccactcccagacatacgcattactgcaaagcatggcagtgtccaggatactgaagtaggaatcaggtgcactctagagatgcaccacatggcttgtttgtctgtccacactggaacagagagatgaagaggcagaaaaggagagggagcctccatgagctcctgtttcatatgccagccatcctaggtggtggtgtattagtgtgctagggtggccggaagactgggcgggttccacagcagaaattgattgtctcacagttcgggagactagaagtccaagatcaaggtattggcagacttggttcctttggagggctgtgagggagaatctgtttcatgcctctgtcctggctcctggtggttttctggctctcttttctgttccttggctttgtaggtgcatcactcctgcctctgcctttttactcatatggcattcttgttctccctgtgtgtgaatctttgtgtctaaactccaccttgtattagaatacaagttactttggattaagggtccaccctacttgattatgtcctcatctcaacgaattatgtctgcaatgaccctatttttaaataagacctgattctgaggtcccgaggggttaggagtacaacataagaatctggggggatgaaatgaggacagaatttgacccataacrtttggcatttcaaggggaccatttttatataaggaatgtatgaaaagtttaaaagcctgtatttgaggattatctctgtggaggtgacacctttgagatttcaggaaaatgtttgagaggctgcactaccctcttccccaacatactgccttcttctacaggaagggattgtatgattttatttgggtacgtggccccccaccacaaggactatatttcctagtccctcttgcagtaggtgtggccaggtgtgggctgtagaccagaactgtccaggagaactttctgtgatgatggaattgtctggtacagtagccactagtcatacaaggctactgaacacttgaaatgtggctagagtctttaaggaaagaatgtttaattttagttagctttagtcactttgagtttaaagagttacatgtggctagtagccctgtgttgaacggtacagctgtagacagtggggtaaatgtggaagtgcttgcacagcacctgccaagctccttgtgaggagggagtgcccccttcttcctccccttcctctgtccttctgcgtgggatgtggatgtgctggctggagccccctcctgacagtgacgatgaggactgtaccacaggtactgtggaactgtgggtggaagggttggggttctttaaggacactgtggagcagagctgccaaatcagctccgggctacttacacacatgaaatatattttggtgagaaatattctgataccttatttaacccactgacatttgagttttcctgccctctttgtctaattggatcatagttaatataggaggcaaaagccaagtataaatcccagcatcattagtgatgatgatagaaatcttttatctccccccaaatcctccttgccacttttaaacaatctgaaaaacaggaagcagagttgttgacttaggaacccacagccttccattcccattattggaggaagcccttaaggaactcccccaccccagtgggattaaccaccaatgttgactacatgtcctgaaaacttttcttctgtaaaaagtttagaccaatttgtccatgttaaactctagtataatttcagaattcctccaytgatatttcttgattacaatttaaatggtctgtttctcatgatgagacaactgcatttgaggagcagtttcacttacctgtgacatgttcttaagtcttcgagctgctctcatgcttgcctttggagttacttgcccagaaaaacaccctgaatagtctcatgaagaaccaaggggcactgcaggaacaggcctgggaggtagcccactcagtcactgctgaaagggaatggaggaggggacagagttgttcttctcacccaactgcatttcggcacccttttagctggcagaattaccacccactatttttgctggcagcactactgcaagttgtgagttaaaaaaaaaaacaacaaaaaaaactcacatttttttttggtcaagctgttttgacaggggttttgtctttaaatagtaatcactcattaattgcctttctccctgcaatccagaaccttcctggtttccttgtatactttggaataggcagagatgtgagccactaacgtttttattttaagtgagattatgggtgtgtttttaaaagtattccttggggccctgtgggaagtgcatgtcctgacctctgtaggactggggccctctggaagggtaattagagtctggccccatttgctcctgtctgagccgatcagtgtgaggaggtggtgtatggtttgtgcttatcaggtcacaggcataaagatgaggcttgctgctagactcactccagtgatggatggatctactgccttgtggtttataaagtgtagatatatattctcaattccatgttagggatcttgaaaaaccaaaaatctttgcagaaatctctggagttaagcaattgtgtttttaagtggagttatctgcctcccaaggccagacctgtcttcgctttgacaagcatttaaaaaattcagttaagcaagtgggataaaagcctgtgtttgcaaatggcttaagaggcctgctgtctaccattataatgacacataacgttggttaacttggttttttgactccctaagcaaaggtcttattcatttttggttttaagatctggtattctacttgataagggtttccataaaaatccacaaatacataatatctaggttttgctaggaaaataggaattacaggatagtgttgtgactaaaggatatttttctctgttatcgctttaataactataaaaggaaataccatggtttaagtttagttttgataagctaaatttaagtttatatcctcttttcgcttttacattctgttgtttcatttgttttaaaaaaaagaacactcaagtgatttctaagcctcttagtaaaacaagctygttaaagactgttttataacatctttcacattcctctgaagtactttgtagaattaaccctttaccctaactttggaaaccacctgtgtgctcactggctatgcctggtctagttttctttttgttctggtgaatattgtgcagctgcggatagaataacattcctcgtatcagtctttactcagctgttcagaatgactttttactggctrttagagccaatagaagttttctgttttatatttaagaccctccaacgctccaaaatctgacattcttacctctctcatgccatgcccctaccttatcctccccacctgttggtcactttcagcacaggttcttttccccacaaatctggaaaaaatacgtgctatctcatgaccacaggttacttcatttggcttctttgctttcgtatgagtacacacccacctagaattgcctccttcacagcctctgtctccaacaaaactgaactcccaatgcggctatgcatttcaacatccagagttgagcatcaaaggccaaaaatgatcaaatggaagcaagtcccccttggggtaggaacaaggatgctgcctgtggcagaacagagctctctatgcaccaaatggctccaggtgaaccccccccctccattccacatagcccccctccccgcagaaggacagacactgtgcttttcacttaccccagtgagatgcacacatatttgctttctgtatgtgccatggtaatgaggaaggctgggaagcactgactgggaagcatcagcctcgaagataagcccttgcctaatgttcaaggtcaatgtcactttgttcccagcttacctttctgccctgatctgctgaccccaggaatgcctgtgcttcttggctcagactacttctgccacaactttgaggtgaaactgacatttctgcctgtctgccggatgtgtctccagtcgctttccactggaccctcccctgactcactgtgctgttgtaaatagcctaaaatgttagaatctcattcaacgtttttgtatccctccacccacatatttaacttgcttggatcttcaattcccattgatactcctcttaatacattgccactgccataatctgcctttattgaccatgccattccaggtragtgatttcatgtcctggggtcttgagtctctcatctgaaaacaaagggagtcaggagtcatgttctttacgtattatttggaattagacctgtgtctggaaagtcaagtttttcatgtccaagttgtgtgatttggggtagaaaacatattccctccaaaccccagtttcttcatgtgtacagtatatacagttctttactgatggtgttgctacatcctgatagagaattaaatgagacccatcttttcggtgtgacctgcacactaccaggcacctaatatacatctggtatacactaactactgcaaaagccttcarcctagtcagttcactctctagggcatgattcttcctctgtgaaaattttccacataccttcctctctagctaatagaaaatgctttctcaatttttgtcgtttcttttacagttagtaaataatgacaagtgtgttgagtgctaccaatgtgaagtgcaagtttgacgggacatagggagaccttatttggttagggtgggctgggctgccaccccaaccaaattaggttgcccatgcagagttgttggctgaatgacttttctgctgtctggcatttaccaagcgtaatgacacctttttgatttttctttttcctcctgtttcccctccaactcacacatacagaattaattaaatgttttttggtttcaactctttatctcatcttgtatggattagccaaatttcctgcctaagttattaaaccaagttgaattctgctatatgtgtgtttgtgtcttcgggatctgatcatctttgaggtatgattctgaatgtcatttgagcttattctttatgacattctagaaaagtatgtatgctaggcctcgaatatattctttttttaaaaaaatttctataatttcaaaaggtaggaaacatgacagtaatggttagttttagattttatttatttttaktttttaagacggagtctcttgctcttgtcgcccaggctggagtgcgatggcgtgatctcggctcactgcaacctctgctttccgggttcaagtgattctccttcctcagcctcccgagtagctgggattacaggtgcatgccaccatgcctggctaatttttttaatttttttattttttgtattttttgttagagatggggtttcaccatgttgtccaggctggtcttgaactcctgacctcaggtgatccgcctacctcggcctcctaagtgctgggattacaggcatgagtcaccgtgcctggccaattttagattttattaatgttagacatagactcgtgtgtcatagaaaacaatactcagagaaaactacgtacctagatgttttttggccttttagttaggcacttggcaatgaatgtgttttctaagtttattagttactttgatagatattcctggtctaaaatctatttctttttattttttgtaagtattctttctgtctaacccctctttaaaataaaaagttatttaggagtttaatgatttggggggaggggcagattctggtaatgtgatgaacgagatggggaggagcagtcttgcaaacctttggtttagtagagaaccaaaaccagtttggaaggggatacaggtctctttctagccatatgtatttgactgaacatgtttgtttggaaaaactagtagttttgtaaatcatccattgagagccagcaagttatctctacatttgtgaaagaaaaaaattgaggtggatatgggtttcctttttctatgtgtgtccgtattgttttgattgtatagaggtagatatttttcttcattttgactgaaagtaaagtcagaattatatgtatatctatacatatatatgtatagatatatttattttctacattttaagaggaagcagcgtgttttaagagtgaaagaaaataagctttgaaagcagacacatcttgatttgagtgctagttactatcattagcttgcttatataatcttgagaaatcttttctttctcgaagccttagtttgcccatcagctaaatgagcacagtacatcctatatggtagggttgttgagtatgagtgttaagtgaggtaagttaagtcaacacaacgtagtaagagatcagtaagtatcaaattccattctcactcactatatgtaatataaataggtttaaatcaacagagtgagtttatctgtaactgcagactttctttgccataacacctttaaaaagttttaaatgcttaaatttactgttctttcaactgccagtttagtgttagttcatatcattttgttttggccgtatttgctaatgttattggtggagtcataccattttctgttggcttcatttataattctattttttttttggctgtctacacattatttcattttgggacctgctacactgttggatttttggctttactcaccttttccccccttctccacttttgacccatctcctcctatttcattttggcaccagtaaagtaatggttcatgtgtatgctggaagcctaccccatacatctctatgggtgcagtattcctttttattgtgttttatttttcaaaatgacaagcttatatttccagtatgtgaaaatgctttagaacttcttgttgaatatagattagttgacattttaagtcttagcccatgttgtatggttgtgttttggttttctatttcttctttactcttttcatcatataccttgtagtttttgtcatcagtgaatgatttttgagaatcctaatgtgcacagcattctgctggatcttgtactaagcagtttaaagagaccctgtgcaattacccgacatttcctgtgtgcttcttataggcagaatttcatagaatacaaattatcctcttctaggtacttgaatctaaaacaaatatggacacacagagcaagaaaatagctgaacagtgagtatgtgaagagtaaaccaacagacaccaggattattcaccataggccagccttctagctcccaagatgttccctccctgccagtcttcattgtctctcagtattgagatgtcagcctcctttccatattacctggaataattgccaagcagtcatgccacttgaaaatgaggtaacaagtcctttgattgaactggcagtcccactccctgtcatagcatccttgtatcagtgttgtttattcatttcatggtctgttctctcaagaaataagcatcaggagtggacagtgatgtttggggggatcccaaggcacatgggaggcagatcttacctctttctgaggaggccacagagagctggatagtccctctgtctgctccctggtagctggaatgtggatctgtgactccatgcagccaactggaagcttaatgcagggaatgtgaactttgaactagttagagattattcactgtgaggcttttgcaaagggcacaggctggatgagtggccgtgagcgtccgtgttcctgagcagactgtgctgtggcccaatcctgtgcgtgtctcctcttcaggctcctgccggagcatgcttctctaatcttaccatttatcactgacccttcggtgaaactctcttctgtttaaatttaccagggtacactttgtaatacttgggaccaagaatttgaagatagtaatcagacaaatcaaacaactagtagtagtggagagacacgtagccctacaggaaggggtagaattatcattaaaaacacagacaaaccagagaytgcctgaaaaaaaaaaaaagatgaactggaaagattcaaagtaggctctatkggaggtgagtatggaaaacaagcttagctttttattttgaagtttccttccaggagtkggatactgtgatctcttcaatcagcatgtttatatagtgaggaggaagaccagaaatgagaagaggaataagaaaatggcagcacagccttttggggtatggataagggtggtcttcctgctacagcagaggagaggggcatgtgtggcccrtgtggaagagcaactgagttggtggctgactgaatttgggtccgaagcaaaaataggatatgaggataggtataagaattttattttgtgctatgtgtgtcatttggcttttaaactgtctagaaataaaatgagatgaaaacaatctgccctcatttcttggttgcttttcttaaatatcattggcccaaagcatagccaagccttttatttagaaaatcctaccttcaaaaagtgataggttacactaattatatttgtgctgttctacagattttctattttgcactggtcctttacctgctgctcgctgtgcgggcagctaaggtgagagtttgaagactatggacttttaagctgagaggctgctgtggtcatacagttttcaacacaaaacttgttctccctctagtgttccacttgcacaggggtaagttgcacaactttgttccattttgaattctttgcaagatttgtcttcatttcctctgttgtatcagattcctatatttccttgtactgtttggccaaactccattgttttcatcttactgagtggaacagtagatactgttccagctttgatattaatttcctctctagtacagcaattccgagtctggagtacattagcatttcaattttgaagagagattttgatctctgagcacccttgccttgtgtctgttttcttgatggttccttgtggttgctttcagtgttaggttaggtttctccagttaggtttctgatgcagattgaaaagcaaacaagcagttaattctgtgcatccctcattcttctgtaaacatgcctagtgcagtgtattgcctctccaagtgctcttgcttaattaacatgctttagtttgtaaaggattgatttgtttggcagaattatccatagttgattctgggagcaaattttctcggatatcaatttgaggaaataaatctcacttctccatgccttttgttaattaatttgtttctgttaccatcaaatctttacttaataagtctgtaaaggatctccagtggtgttgagatgtcagtgctgtttggctataaaattcaaggatgacatctaatgtgtgccttttagtagagatgcaatttacttatgtagtagatttgtgaggagcatccatggaatagtcatcccactatgattgtatataacaattgtatgtacaatatacaatatatatatacaataaggaaaatgtgcctcttaggggttgggaaaccagtggtcaaattccacctctggcatcatctgctctgggactgcaggcaagccacatcattcggatggcttcccttgtgttgtaaaggggggacaacgtttttgccctccttttttgccaggctgctgtgcatggccctgtggaatcatcaatgtggcagtgtaatagtctccttcctgcccagtgtggaccccagcttggcctgtgctgctcccatccacctttgtagcctgatcttcagccatgttttaaatattctttgcgctgcagcaaacttttattccacacacacaccatggccttctcataacgggccacctgtcctctgttaaggctcttttggaatgctctgtatgtgcctctcagaacttctcccagcttcccagctacaccttaaatgccttctcccctgtgaattcttccttgttcttcctaatctgaagtaggccttttagtaatctctgataccatgtcatcttctggtcacaatgttgaattatagtaggtcacacatgtgttctgtattcctgactaaattaaactcaagggtcaggattctgtgttgggcatctcttactgtgctaagagtgccctcggatgaatcaggagtttttggatgttgactggattgcttttgatgaatcagccttagtttttcatatttgcacaatacttttgagtgttctctaaggtcagcttcacctatggagaatgacataattctgtgttccactgtagaaatgtaagttgggtatccttcagtcttgctaccatagtcaaggagtgacccctgggcagccagcagcaggtgggcgtttctgcagtaagcctctggggctcatctgttcttgggaagccaagtaaaaacacacacaccatgtggggtgataaggggcacaatctcgtacgtaggagaattgggatgaagtgaaaaatgaataacccaggaatagagaagggtgctagtacattctgtggcagtgggtcttaatggatgagtgagcaggagcttattgggatggtaggtgagaagtgtctccaggtaatgtccagaagggggtctgagcttaatgtgcatggttgcaggcgagtgggtatggggtatcccaagcccagggtgaagagtgggtggggatgcaggggatgctggtggtgatgccctttagtcatggggagataaaagagcttgggcttctcagggaaaattaagtgcatgccatagcaaaatggccataacagaggtgcttacctgcccatcaaccagtggcataatcacgggggacacatcctaaaattcagagccccaacctcactcccaacaattctgattccgtaaatctagaacgggactcaatattcatgtgttagtaatttatcccagtgattctgatgcaggtggccagtgaagcacactttgagtaagtgttgaattacctctaagaaaggaattataaaatttgcacagatacgcatttgtcctagggaggaggatcctgggtagctctgttcagatactcaaagggatccataagctcttcaaagtttcagaaccactgagctaagacaaaagcttgtaatccagaatgagaatagcagcaccattgcaggaatattggagatcagtaacctttaaagaaacattttgtgtgatagaaattgttggtgttttcaggagccctactggaaacacattagggaagtgaaggcttaccacccaatttgtaaatcaggatttaggtttgtgttaatatctcagtgtttaaaggacatacagtgtttagtggctctagcaattaacaatttgtctgtaataggatttttttggaaacacttcaagtccacatctttctctgacctaattaaaccttctggtttcccctgggttttactttttaattctgaagttagaaatatattaaagttcagtagaatgaaggtctttattactaattatcagtaaagatatcacattttgctctcctgtggttaaggtcttatctgtatttctgtgataaacatctctctgaagtttatagagcatatggagaaaaatgagattgatacaacttggtttttactcactcccaaccccagaatttttgaatcagtgaagtgtactgctgaaaagtgatgtacacgccctcatttctcccctgaacccagggtaaaatgaacatactgtttatactggcaaattcagtacagcaaatgggatgaagtaactgtcggagggagtctgtgatcagggatgtgtttcctggtgatggctgagacagagctatcagctggtaactgtagcttgtccttcagcaaggggttgcagctactaagcacacatttgatcattggtttaaaccttacagaaattgagctggtctgtgaagcctcctctaggcaaatttctagctccatgaagggttactatttcttaagtccagtcaatattccatcgatgcacaagtgtttattctctattcacaacacacacagtactaggtattgttaaaggtaagtgtccaatatggccaagggccaacaataagggtatttaaagaatatctcaaagagagatccaagccacagataatcaaatataaaattacccactcagactattaaaaccaaatatatggtgacactttgtttaacttatcccagcaaccacaagttcttacaagtcagccatatgaaaaataaaaaagcttcctgagaaacagaactccctactctcttggtatattaaacatatcccaatgaatagtttctggacgcagataaggctcatcccaggcatattatgaagtcattgaatttgatactgtcttctttttttaaacttattttccacccacttttcatatgtctaatattcttatgtaatctgcatcaaaataagaaatatctaatatctagttatccttacttgtggattgtttatgtggccctgtgcacaataggtctaaataaatatttttttggagtagctgtggttagaggactggctatgtgaagccattttcatattatgttcttttgagttttaaatttcaagcctctttgttacagatggaaaaatgtagacttactcaaataattgtagacgttagtaagcagaggctgagaagaggtttgggttaaggagagttgtacggaaactataatattaggtgttcttcagtgatcttttcagcaaatatgatgtcattttggattgactgggataggaacagtcacctaaaatgggtcccagcccatgtaggattgacaatcctagatgccttgtcctgtaacctcaagtttcttactttttcacaatagatagggagtctggccagctctagcactgatcttcatatcagtagggtttcttctgccttctcttctgctgccgcttctctttttgctttagcattgagcttagccatccttcttgcttgtatatttaacattattttatttagtttttctattatagccactttccccaacagtccacctgatctaaccttaattatgttgctgataaagaattattgtctttaagggaagcaaagaaaaaaataatagcatgtgcaatcttagagtgggaatattaccttagagataatctaggcctggaagagtctagtattgttaaatattaattttttttgtggcctagtctttctgttgcccacagtacaccaacttttaagtaaatgaaagttgaatatatctggttgaagcagggttttagaagggcctgcgctgggttcgccctygtgggctgagagagcctgaggattctgaggatcacagggtgaaaaactcagtgatccaagtcatcatgcttttttttatagacaggactgagacccagaaaggaaaggaaacccacagttaactatttactaggtagctagataggtaagtgcrtcccaggtagctagataggtaagtaggtcratagatacatagcataatgtatgtgtttatagaaacacacacatatatgcagaatcacttaattcttataacattctagaaggtagatggttttatagatgaatagatgaggaaagcttgtaagttgatagggttggactcacctatrctccttctggtggcaaatctacattctttccaccctagctccattctgctgcttggttgccttgtccaaagccacacacaggcaaggacaggactgaaacccagaccatctgcctcttggtccagggttgttctctcagcagatctgttctcttcagtcagtggtaaaataatacatgctaaaaagtaaatggaatattgagtaaacactcagttagaaaaagagagaaagacgtcccagctgtgttgaccttgagaagggttaatgtttttagttccctatattttagcaactaattggtcatggaaaaggatgggaaggaaagctgattcatcacagttttttgtgctaagtattgctcagagcttggagaattgcatggaatctagcttccttatttaaaaaattaataaggaaaaatttttcattaaagcatgctttctttatggcctgagtattgaaacttgagattgaatatgtattaactacttgtatgtttcataaatttgaaatacacataatatgtaattattgacattcttctcatgtttgaaacaaaagcggcagacacactgactgaggagctgaaccagagttccagtatgatgcacataaagtccgtgtgctttttgttgacttatgctgaggtctgccagataacagccttattacgcacattcttagaataacaggccattgatatcttagtagattcttacatttaggtactgactctctggttttcttttttttatctggctcatgtaggaaaaggagaccttcaggatgagtttttgttcttcctgttggctcttacagcatttttcatatttatccttttaactcctctgtgttccacaagttgtcttccttgaggacaaggacttctttttcatcctgtccgttctcttatcccttccccttttcctccctagtgcctgacatcatgcctggcacacaagtccttaggaggagtgatggtgacagggaaggagggagatgccatgagtcagataaaaaaggcaaaactctagaatcaggagtttcttcttcctttgatgtagccagagtgttcagtgaatggagtccattagatgttttttcttcagcgctcctttctaataaagatagagcagtaaacagtttttattcttacctttgttacaaaaaactttacaacattctgttaaatctagcaagtatttaatgagtggcaaacacctttccaggactggggagacagagatgaacagaacattgtccttgttcaaggaccgcccagtgcaatagagaagacaagcatgtccaaagttacattgccctgcagtatgataaggacatcaagaaaacctgtatatttggcagtgatggttaccacatgggaaggagtgattgattttatctgtgaaaagccctcagcaacaggtacctgggagaggtgttgtccgagctgggatttgaaaagtgtgcaagagttttccaagcagatgctgggggaggggtgggacaagtgctgaacaggtgcagggaccgcatgagcataggggtagcatatgggcaggaggatcattgggggtgaatctacagatagtcgggaattactagagtgtaaaactaaagggaagtggtggcaaggaatgaagataaagaggtagacgggggttgaatcagaaaaacaacagatgtcacatgattaaaatttgagtactatccgatggacaataaagggctgatgaatagttttaagtagggagagagcattttcagctgtgtattttataaaaattcagcttgttgggagtgtgtgggatatactggagagagcagaatccaggtttgagggaatgggtcaaatcaaacgggaacatgagctgaaactcaaattgtggcatggtaggaataggagactgaaagaaaaatttaagcagttgtttaggagataaggtgtcaggcagagagaggcagtcactcagccaatataggcaagataaagaaagaaatgtctgtgactttgttatcctgtttcagatagcatgtgccaaacatagttgtgactttctttgatgttcatcaccttgtaacagtgactacactttcacatacacctctaagttcaatcttccctatttccctgggagttaggtgatagatattacaaaggactcatacattctatagggcccacattctcagggacttgctcatgttcaaaattgcaccccaaaatccttaaggaaccttttgggtgggagaccagcataatgtttctcagtaagtccaataaagtcatcccctgcacccccttgtcattggattgctgtttatgcatttgagcataggattagattggtgatttggattttggacacactttaattaaaatgctgatctttaagcatgaaaattatttggaccccagtgaaatgtcacactaagcaaagcctggagatggaaggagcagaggctaactaggtggaggtggaggagcaccagttcatatttctaatttcttagtttcagcttgtttggagcrtaagattgttaggcttctggactaaatgtatgatttctctgtcatatgccccttccttttcaatgttgaaatcatgtaagttgagcatacctttgatatgaagactgcatatctccttttgatgcaaagagcaagacacatgtaactgatccaggactctctgtatctcagttctatgatcccaattaaatacactcatctgtacgagttccccatggttgtattagaagaagttctcctcatgataggaaattggaatgaatattttaccgacaggatatgtgaaactatatttactttttccttataatttgattctacccaatgaatataatgtgtagaaaaaatgttcattgagggaagtacatttagttgagtttaggttaatcaatgtctggtgaaaataaatagttggctgtctgttttaagctgaataaatagcatggtttggctgtactgcatattggtgagttcaggagtttatcagctgtcccagataatgattttatgctaataaaatcaagaggtggatttgtaaatcacactaaactggcagcagtgctactgggcataaaatgcaattcttttttttttttttaattaatttcctgggtatctctaaccagtaaccaggattgttttctacctaagatatctcttcttgttttgagtaactctacttaggagaaaaattatagatcagggttttcttagcatgaaatttaagcaaaaaattcaacactttgatccagccgtgctattctgttgtcctttatcatctgagaggtgtttatgactgaaaagcattatttagagcaataatctctgaatcactttcttcacaacctttttgaggaatacagtacaactcattgatgtatggaagaaaagatttgaacttcagcttacatgtattttctaataatacttaaaaaggtcagtatatgcatgcttgtaataatctgcatatgtagagcactacatgattataatttatacataaacacacataggatggttatacctttttaagaaaggatgtcttctgaaaaatgtttgagactactgatctctggagcactctttctgggtcaatgattagattattctgggacctttttttaaaaccacagattcatggggctgttcccagaatattctagttaaataggttgatccagaacagtgattaccaaacattagagtgcattggagccacctggagagttgttgaaactctggctgccgggcccaacccccagaggttctgactcagtaggtctgggatgaagcctgagaatttgcatttctgagttcctaggtgatggtggcttgtccagggacccacttggaaaatcactgctctagtttgggactcaggacaacagtgatttcagagatcaggtcataaatactgatttagtttgacgatcttctccctgagacatttctggcagctgtttcatcattttgttttcatttgttactcctgcttctacgatagaggcagacaactattttttacactctctctcgttttcactattgtggtatagaggataagagcaccagtattatattcagatagattcacatttatgcagggaattcatgcaagtggtttaattcaatccaatagtagctctatgaggtgtttatttgtatgtggaaaaattgagatagtcaagttcctaataatttggttgcatctgtacaatatttaggaatagaataatactactgcacattaaagaaaattttactatcaataagaaaaatacatctttgtttgtcgcaactcagccttttaaaaaattaggaatccatagattgatatgaaatgaagatggggtaactgtaataaatcatagaaacttcaagaacaaggcaacttatttcctttgtatcatataaaatatatccatcggcaaatagcacttcttataatagagcatagcattagccatttaaatgcctgtgtaatgtgtaaaaactgcttgctaaattaaattatgtagaagagcctttctataatgcttagtgtctgattcactaaacatcactggggcactcaaagtttaggaggcattatatgcttttattgtttgtcaggcaattaaatgtagaagtcactgtgatttaaaagaagaaagcagggcctctgctatgttggtatagtttttttttaatactcctaaaataattawgtctattaaatctcactttctgtttatcctttgcattgtgtagtttatagccatttattctacacagttttaaatttgagataaataggatcctctgagatttcatgtaatttaggaaaatagaacatataacattaattcttttggggggtactgtagcactattttttgatctgccttctctattgagagacccatttaatactttatgcatttgatgaaggctgacttaaatggggtcattctgtatttggaacaatgagaaaaattttccagaaaactcatcaaggagtattacagtctttttacaaaataactttaaatggactataattataacaggaagaatgtttgctagtgtatgtaagtcaatttaacctgttaaaggcagaacaattcaaaatatgtgtgtatcttacaagtttatgaaattaacatttgattgtcctccactggcttcttagaaacagcactttcgagagcttatttacaatgcaaatcactgaacagttcgtatataagcactgtaaattgttgtttacttactttctagagcttggtgaaaatgtgtgagtacagaccttgtttgaattgctagtcctgcactgaagctcctgtgtctttgggtgagattatttgacccttctaaactgccatttgtaaaaataagaatgtaccgatcaggatccaatcaggagagagaagcaacatagtaatttaattagggaacatttataactgtaacgggtattagaatacaagagatgggttagtacaagctaaggagagcattgaagaataaaggaatagtggatgtatggagctgacgttagcccaggggcagagacagagctccagggaggagactctttcattgctgagatccaggggaaggctgtggctcagtggatggcagaggagttactatggggctgcacctgcaggactcagaggtaatgtgccctctgattggccgtgaaagttattcatagggaatgttctgctggaggcacttgctacagaaccactggggcactgtgcaggggcaagctgctgctactggaggagccaggcaggggggcgaccctgcgttgtgccctgagggacctgccagggagctcagggaggccactccttcctcctgcaggatctctcctgtaccctctactgataaagcttataccttcttgcccactagtacagaaaacgtagttaaagcatctggatacatttttgaaatgaaaaagatttagagctaagaggtgtaataccttgataactagtacagggaatattgatgcttgcctttagaatttttttttaaattaaaattaggtaatacatgtttatatttgcatggcttttgttctgtaacatgttaattgaatcagacatgttgagtgagataaaagtcttactggttgtgaggagtcaatgacatcatgactatattttgccttaggcagaatctgactggcacatggtctgtgttcgcaaaatggtagctgttgataccagagaactttgtagcttacaggttccccttagactgtgtggcagtgctctcacacagtagtgttggttgataacttcaagctaaataaacagtcttaggtgatggctctcaccccaaaaccttaagaatacaagtagcaatcttgaaggatcttgaaatcaatttagtggatctagaacctccttttagaacagaatgataaatatttgtatatctcagtagagataaatttggtttttaaagtgtacaratgatttacgtktactgggtcaagatgtcatgactatgagtcacaataaaaaaaacaatttttaatatactgctttaaatggtagactctatttcttgtcaatttgttttccgttgttttgtctccaggcctgaagcttcagtaggatgtagaatggtcacataaggtttcctttggggtgaaaatgggccattttctttatagcttatgacttaatgatttcatactactcttggatcaactgaatcatcctyagctgttccaaagaaataaaaaagataaatatcctccattatgcaagtgacaatattttattttcataaatcaagaatgacctttatcaacaactagccttgctgtctaataattgccaggaaaaaaaaagaaagagaattcaacttttgtaagtcaaaagccataatttgtggagacttcattaacatttaacttgcttatagtttccaaccatactagaaaaatgaacaagttcgttgattttgtcacattttgcagttggttcttcctgggatacaccaggacagggctggatggtttgtggaggaaggttaagattgtttttgttgttcagatgtttattatgcttcttttggaaatttccaggcaaaataattgcagccagattttgcatagaactttgggggattcattacctatccttttaaaaaggctttattgggtgtttatcatgcagcctgctctaaggagtaccaaggtgactaagacacagttataatcagtattgctttggagcagattttctactctgcctatgggcttttctgttctgaaactctgtgattttcaggagagaatattgggcccaactccattttctttgatttctaaaacatgtaggatctgcgcatggtggctcatgccttaatcctagtgctttgggaggctgaggtgagaggatcacttgaactcaggagttcagaatcagcaacatagggagatctcgtctctatcaaaggaaaaaaaaatttagctaggcaagatggcatgtgcctgtggtcccaggtactctggaggctgaggtgggaggactgcttgagcctgggagatcaaggctatagtgagctaggactgtgccactgcactcaagcctgagcagcagaatgagatcttgtcttgaaaaacacaaagaataaaaagcatgtgggtctgcacttgaataacattagcacacactacctgcagtttttagttggagtaaatgtgcaaacttatagtagcccacgaagtcattgttgagagcmagagtatccataaagatatatatatatatatttttttttttttttgagttggagtttcactcttgttgcccaggctggagggcaatggcatgatcttggctcactgcaacctccacctcccaggtgcaagtgattctcctgcctcagcctcccgagtagctgggattacaggcatgtgccaccacacctggctaattttgtatttttagtagagatggggtttctccatgttggtcaggctagtcttgaattcccgatctcaggtgatctgcccgccccagcctcccagagtgctgggattacaggtgtgagccacagtgcctggcccataaagataattttaaagcatatttcagttttaatctagaatgcactgggctcccaccaaatcaagcttgttgacttggagtgtggtcacatactgtcataagatgttattgaatgggccctaaacctcattgctctgttctgagggatgctgttgagaactctgttcattaacttccaacaattgcttcttcccagggttctgggaaggaagatagttctctctgaatttagggtgagggtagttgtgtatcttcttggtctccagtttgggagatactatcctgtagtgttaagaatatgggccccttatgactggatgcctggattcaagtatctgcttcacgactctccagctttgagaccttggacaggctgtgtaactttgtatgccttggtttctgtatctgtaaaatgaggatcatagtatctacctcatagagttggtgtgaggattaaacaagtcctgggtaaatgttagtctctattatcagatttatatattattttatagatactgtaaatttatgatcagtcatattttcttctttgcactggctaccccaaaactcaaagtgaaatctgtggataaattccggtacatgaacttagtgactttttaaaaaattttttggtggtgggtgggtggagtcctagccacatttctagtgtccttttctttgctctactttccttgccttttaacttatacttttaacagttttatcgatttaatttttatgttattgtgttgaattgcatgtcttggaacagtataggaatcatcactgtcatcaattacctgggtatttgccatccattgacgcttctttttgcatagtaactcattcttatctagaacctgtgtgttgtattcaaagttgctaaggaaaagcctttcccaaggtatgatggagacatgcaggtacacgtgtgtgtgtgagagacagcgagagagaaaaagagagagaatgagtgatgccaacaccaccccacccagcttgtatcaactttcctccatcttgtatatgacttgggtttagtcgtgatttagtcgtgattcccccctgtgaaacatgaataatttactttgatttaacagagaaatatagtacaaccatggactgctgggagccagtccaggtgtgacagttctggagaaaagttagggagtctgttgctgaccatactgctgtagatgatggcaaaatttgtctgtattattcagaaaatcaagaagactgtatttttagaaatgcgtccttttactgtgtttcaggggactttgcctccttaacatatatttttcattgtcccccatagcatttatttgaagaacctcactaactgcctgttcttggcacttccatgtttaatagaggaacctacaggatgttacctatgtgaatgctcacaactcttcatcttctcatgaagtgcaagttttcaattatatattccaactagttgcaatgaaatgcactcctgagagtgctttgttctatgaggtatatctggcaagaagaatttaagaactgataataattgatgctggctgaacatgcctgactcttgttacactgactttatatttgctgtctgatttaactgtcagaaataccatgtgaggtacatgttatctctgttttttacataaagaatctagacttgggagactaagtgatttgtctaaaatcaccaagctaacagtggaagaattggggatatgcgtgtgtttgactcagaacctatacattttgctattacctaaagctgtcctgaaaactgaaagcttagttgttctttctttacttggttattttaattctgatgtcatttactttaactcatcttattttagctcaataaaccatctttgttattttgggggggtcccacatctgttgaatgaaggctaggggtggatctgaaaattggtgtgcagggaaatgtatcttcactgggaaatatgaaattcatagttgatcccattttccagtagttcartaatcattcataagyccssgaaagaaccatatcatactttatttgtttcatttcaagtgataagaacagctttgtgtaatgggaaaattataacctggcaccagtgttgtattagtcttctgggtttgctctcagccacacgtgcatgcttttgctttatatgtggttctattttagtgcaayagtggttttgtaaaccgggtctgtagccagccttaagttgttttgtggatgcttatcactatttctcactgttttaagatcgcactgtaggactttcatctgagtgctatctgtttccactgggggaccttctctgtcaaaattgaggatttcattctttttgaatgttattagtgctgttgccatttgagcttattgctagaatactgaagctgttttctacatcaaaattagggtttgcaaccgagagacaatacttctcgtaaatgtttgcagtcttctaacatttcgtaccccaaactggaaagttgttagtattacgcatttgaaacaaatccattttgtttctggagttgttaaaactcagtaagagggcaatataaatgacccgttgttgtcaagtgaaatattgaattaagtctgtatcttttgagttgttttgttctcaatggagtgtttagttgaaacaagtaattgttaaaagtgttagagaagacagtgtccagggacactaatttcaccatcagatctggagctaacaactaagacaaatctagaaagctgggacagacagtctgaggctccttgatgctatcctgtttaacattgtttatcagagccttggaggcagatgtagaaagcatgctcatcagatttgcagacaacacaaaactaggtaagatggctattaccacaattgaatgacaatgtcagagttgtagaatggagtgatgcacaaaagcatgagatgggatttaggaaggataaatggagagtcctggatttaattcagaaaaccatctactttcttacaaagtggagagatgactcagtggcagtggtgtacaaaagccgtatgggatttcaggctcgcagaagctgagaatggaccagcaccctgtctgcactgttgagaagagaatgtggttaagggcagtagcccgttgaattctaaacagctgccaggatggttgaagggcctgtaaaccttttagtagcaggaattacagggagcaaagcatactttgcctgttgcctggagaagtgaagacttagaacatgacagctcttttcaaataatcagctttcctgtgcaaaagctaagatcttttttcttttcttttcttttcttttcttttcttttcttttcttttctttctctccttccttcctctcttccttccttcctcccttcgttctttcttttctttctttctttctctttctttctttctttctttctttctttctttctttctttctttctttctttctttcttttctttctttctcccttccccttccccttccccttccttccttccttccttccttccttccttccttccttcttttttttctattttttcacaggctagagcaaagataaatgggtatacatttcaagaagcagagtttggccctttttaaggggggatgttctacatagtcaggatgctttacaaaattctgagtgcctcatctattcagaggctggctggctggctgggaagttgtacagttgacctaagcatttggatagaagttggaccaggtgacctctaacatctgtttttgctctgaggttggamaatggctgttttacttatcttcttgccaacaggacacacattgtggacataatgtaaaaatattcttaaattcatgttttcttgaatgagaacacttaattgtcatcagtggcaaacaattataattttttgaattaatatgattaatagcattatatggatagtagaattttcataataattaataagatcaatttaattaatcactttccccatgtgaaacatggagaaaagatcttatactataaaaagtaacaggaggcattcaagaggatatgagatgggacaaaatcatcaacgtgctgaatgctattgatgctgaaacagctgaattactatgtatattttgcattttctattattctttgttttttttttaagtagtttcatttctagtaccagaattcagcagatgtttaccacatgcttagtctcgaatttatttttccctttaaaacttgtgtggactgtaagtgaatttatcatctcttttgattttgagacctcatatctccaaagtattaaagtaaaacctgtttctttgttagatttagaataattctttggaaaatattttgcaagctgtaccatggtttgtactgcattttgtcctctattattgtgccaggattgaggtgaaagcatttcttttttcattttttggacaaattataaatgtttcttctttattgaaaacatgttgaacatttaagtcagttctcttaaaatttttaatgcaagagcaatttttcaaattcctatacatctggaaactatgaattttaaatttgcttaggtcttactttcttttttttcttttctttgtttttttttttttktttgtttgtttgttttttgagacagattttcgccctgtcgcccaggctggagtgcaatggcatgatctcggctcactgcaacctccgcctcttgggttcaagcgattctctcagcctcctgagtagctgggattacaggtgcctgccatcatgcccagctaatttttgtatttttgtagagatagggtttcaccatgttggccaggctggcctcgaactcctgacctcaggcgatctggccgcctcagcctcccaaagtgctggtattacaggcatgagccaccatgcccggccagatcttaccttcagctggcttctaccaacattagattgcttttggagagctgcgtaatacagtgatgtgggtgaggcatggttaatactcagcagcactcagcaagggatcactaagtgttggatgcacagctcctgagtggaaagacctaatcagatttagtttggcatcaaacttggcatcaagtctaaggcttcctgcaatcatcatagcttattctagaggnctggttggtatttacattactttttattcttttacattttaggtggctgcctctttgatgagccgtatagcacatgtggatatagwcaatctgaaggtgatgacttcaattgggagcaagtgaacaccttgactaaaccgacttctgatccatggatgccatcaggtttgcttttagttttaagttttgttttaaagaggaacacaagagtctcaatcatactatgtgttcactggatattggttaaatgagtgacggtgttggtctttggatgtggcagtcaaagttggattagctagtgagagtggtgcaattaacaggataggttataaaagttttatctctctccccttaaagtctaaattatacttcttttatttgcaagtacatcttagctagattagtgggcattacccagttgatcttttcccaagcagcaaatatgagaaaaagattgagatctcttctggtaaatgtgtctaagtgttagaactccagttggggaatccaaataacagtctccataggaggccttggtgggggacttttcttagcctcaggggctcccttggcacctgggagatctaggagaatgcccagtgatcttgaaagttttctgaagacaaaatggcaatgcaaaaatgtgggtattttttccactgaagaaatgtttagtgaatttctgatgagtgaaagatgtgttccactgaacaccaaaaagaattttacttcttgttgggagggaaaagtaggaagatggtgactagtgagctctaatcagcttggagcttgattattgcaatggaccctttttcaggctatgacattggacatccctttaggactttagrtctgcagatttggtgataagtttgctccactcaggattcaaactgtgaaacatgttgttctgatttggatttcagatacaacacaatttttacactttttaatgaatgcagagtttttcattaatgctccaaagcgtaggaataattacacttagtaagtaatcttgtaaaggtagcttttaaacgtgaagtagagtttaatgttgtcactaaggtttaacagtatgatgctcactgtgttcctgccctctccttcctacatttaactacttataacttcaaagaagggagcattgagctctttatcactgtggcttcactggacctcaaaacctttttagctgttggttatttccttgcagctgcagctcacaccctccttttctgtgtctcttgttttctttgtatgtgtgtgtgctgttgaatatgactgtttaaatcaggtttagttgcttttccaaattccagttcctgcttctgttcttgtcagcgataaagagaggggaagaggagaacacagctgtgctcctcctgtggggccgtcgtttcccaaacaggtgtcttcccctgatggccttttggtctttcctgccctctcaagaggatccagcctgtgtccagagaggctgggctrgctgaggctgtgagagtggggagggtccttagatttagtcctggtagattgccccagaagagtgcacttactcttgctttgtctattaactcctcatttgataaaaaatttgaaatatttcacattaggtagttgacttcattatttttgttcttaaattgaaacttgacttgaaaaaatcagcttttaaaaataagcccaagtatttcagaatcttttctagcctctcctgactctgtttctggcacaagataactcacctcccttgataaatgaggccaaataaataatttcttgtcaccatcttgtccttttctttttttcaatggcccaccttagactaagttgtcaactttaaaatattaaaatcataggtttctagcacaggccgttaaaaaaatggtagtaaagttcaaagcccaggtgtatcctggcacagccagttaggtaattgaaagaacaaaggtgaatgaagaggaagtgatgctgcacatatatggcctttgaaggctcttctgacttgagaagaatgacatggaggcatttatatgttttcttatgatttattcttctattgattaatagaatacttgataattaatattaggcctttgtagcataagatctgtgagtgttacatcttgtaacgcttttgtcaagtctgacttatttctgatagttacagaaggtgtgttttggaccctcacccccaaacagattgcaactcattgtttggacctgagagtggtttaggtgtcagcatttgagtgaggaaagggaaggactggcagttcccccacctctctggctgtgcttatgtgcatgggtgcagctcagatttctgaaaactattgttgctccatcagattaaatatttttgccataatatagaactgaaaatacagtttttctttttctttctttttttttttactactcattaaacaaactttagtcattagaaattgtttttgagccccaatgtatgctaaacatgatggtaattattgtaggagaggaaggattataagaaatgactttttctctttaggaacttatctacttggggraaaaaagttacaaaaatacaattagtgaacaatctaaaatgatatataattaagtgtgctatagactggaagtgttctaaaagcagtttctcaatatcaacccaatattttataaaagaatgtggagctgtgcccagctgacccatcgaccaaagtgaggagttacattctcaaagcaccgttgttagaagtgaggaaacagcatcttataaacatgcatgtactatcctaaagtctagatttttaaactgagtttccaatatgtatatacagccataagttttaaatgcttcttagtttccagggttttcaccttctttttcttctcctcttccattaatgtgtgcaaatgatttattcctttcaaaaactgattccaaggctggttttcccatgctaaaacagaaatgactcttatgaatttctcagggcaaatgggtgggaaaatcagatagaaccatagctttctgagggcaaattttctaaacctttatgtaaaatactattggatttattctttcatgggtatgtgtatttgtcttatgtatataggttggttccgtaacactttagagaccaagagttggcaaactgccctgctggtcaaatccagctcgctgctagtttttgtgtggcttgtgagctaagagtggttgttacatgttttaatagttaaaaaaaaagcaaaaagaataataaaattttgtgatgtgaaattcaaaatgcagcgtttacaagttttactgacacacagccatgcccatttgtttaaatggtgtcagtggttggtttcaagctacagtgagagtttagtagtggcaacagagactggtccacaaagcgtaagatatttatgccctggccctttatggaaaaatgttgctgatgcccgtcttagaccattttggcatcagcatgtaattgttattttggacccatggtttatattgttgttgttttctatattcatataattattaatatacaaacatttcacattttctctcactttcagaagatgtgttttctaaacattgggctatcaaaatcagtaagaaaaagaaaaaacatgattagagatttcctctatcattgccttaaatttgctatctcttgaaaagcatcgtgatgtgattttctttattttttagtacctaaatctttgtcacagtcctgtaattctaataagtgaataattcatcaagggctgggtgcggtggctcatgcctgtcatgctagcactttgggaggctgaggtgagaggattgcttgagttcagcagttcgagaccaccctggacaacgtgggaagaccccatctttataaatgaagaataataattcatcaagatgaatttaaaagttatgacagtgagagactaacatttcattctaatttttagctttttactttttctgtgtctttttaaaagttagtgctccagtgtatagatttgtttccccatatccttatgtgtgaggttatttttaaccacattttaaaaaattaaaatgcagtttggagttttgtgcaagctggcttgataactactctggagcagtgacgttagctctggaaatacatatttagggggaataaatactaaatgccgtttaaatttttgtatttcaagtgaacattcatgtcatagtagattaaacttttgctgctagctctgagtcatcacggttttcttggtggtgaaaccatgccaaacctaatttctctgttatcagtgagtgagtgattcgtttcatatcagttgatcttctctagtagcaatggggaaatttctttcttttttctttttatttttttgaggcagagtttcgctctttcacccaggctggagtgaagtggcacgatttcagatcactgcaacctctgcagcctcccactaccttcccgccctggttcaagcgattctcctgcctcagcctcccgagtagctgggactacaggcacccaccaccacacccagctagtttttgtatttttagtagagacgaggtttcacggtgttggccaggctggtctcgacctcttgacctcaggtgatccacgtgcctcagcctaccaaagttctaggattacaggcatgagccactgcacccagcccacagtggggaaatttcttgaactttatcataaggattactatttgaacacaaaaatcttgatatagtaacctggtattttttgttagcactgttacatcctatcactttatatactgcagcacattctataattatcacatagattaagaagcattaagaagggttttatgatataaaaacacctacctggtttgataatgtggtattttgtgtacttgtacctcagtgttccagttctatataattgatacttagtagattctatgtgcttaaaaatgtaaccctgtcttataaaaaaattatcaaattcatctacaatattaaaaatgtgaaggtaacttataatcatagctataaccgtagctatttgatactcatgacatgtatttatagtctatgttgtccccttaagttttcttacctctagaaaggctgtaattaagtgaaagtggatatcagtgttgggaaaacataattctcttagtatttttccaggtagtatagcatgggactacataaagctcatttagctttccatgtcttagttatatctgtggggaattgggaatgatgctgctgctaattttcatggaaatgtgactaagaattgaatcacgtctgtgggtgcccgtatgaaagacagagaggaaagtgtcaggatggagcagcgtgtgcactctgtgtgatgacccagaaaatagaaaaatgactacatatatttgtttagagtcaatttcacatttgggaaggaagatggattgacagacaaagtaattgaagttttctctttggatgcacttatcaggcacattttccttgtgctaaggaagacttccctatttattcacacttcaggacttattcaggtcttagagagtaacaaagagaagatgacggtgggcttgaagacttttcccctctaaaatttcagcatgtctccagtgagaaatgtttttggcacagaatattcagacagttctctaattatcctattcattctttcaaatcagtcaacattcaacaaatgtttattaaacacctgctatgtgctatgcattgttttagatgcctgagatttttcaccgagtgaaacaaataaagatcctcttctcagcctaccttaaattcttcgtctgataagatcgttcctggatgggcttacgattatatgctagaaaaccacattttcccacatttattaatgactttctagtggcgagtatttaagaggtaatccaaaatatagttcatcagacccagcacattaaagcatcaaatctagctttccatatagctttcttctctaaaaaaagtaagataaaaagtctaaatcttaggcaagtggcagcacagtattttcagatcagtctgccttagaaaacaaagtaatsttgtacatataaatgacactaagcagtcaacaacatttgcttttttgttctgtatcatttggttctcgtgatgggcctggtagattgggtggcattatcctcattttacaacataggaaactgaagttcagaaaaggaatactttacccaggcatccatggcasaacgacagccttcacttttgttctttggagtacccttatgtattctcttcacgtgagaacatgcatctggggaagaggctagtctttcatttcaggtgcatgcatttggatcttcttgaaatgaatgtgaaggctgttgaccatgggtctacatgccctgcccaggtcagctgctggctctatcaatgtgcagctgttgaccttggtcaagttctgaagctccctgttttagtcctattatctgtaaaatattagtaatagctgttcgtggaacgactactatgggcctggctataggtgctagagctgtagcaatggagtttctagcctcttgatgattaaatcccatggaggaggcaggcagtccacaggtaagggtagaaaatagactgtcatggtgggaagtgccaagagtgctgaagaggaatcaggataagggcttagagagcaatgggggttgcagacagggacagcttttctgaggatgcatctttcagtaaagacctaaatcctgtcaagaccaagaggccatggaggctgagtgatccagcgtagggaagagcaggagtgtgctctgctggagctaggggtgggagtcagaccacataggaccctgaaagccatgggaagacgtttaaaacctacctcaaagagttattgaccaggtgagacccaataacacacaccaggagcttagcctctaacccggcccagtgcaatgttcaacagatttatttcctttattagtattattaaataatttagaggcaatttggtatgaattcatctcttagcttaattttgactcagctaaatgggcagcttttgctaaattcttattttctcttctgaatgacgccaggtaagaaatagaagatataaatcttcatctaatttttgattggattaaaaagccccaagctgaaataagtctattaaaatacaataattaaaaaaagtctttaatcagtatatttgtttcaaaaccctattaatatctcaaatgaaattttcagatatttagatgcagcagtgcctatttttttgagtcaagattttttaagttgtaaaaaattaatgttgaatctgcaaacaatcaaatacactgattttttttctccttcttttattttaggttcgggggtacatgtgtagatttgttaaatgggtaaattacgtgttgctgaggcttggtatacaaatgatcccatcacccaggtagtgagcatagtccccataggtggccttccagcccatacccctgtcccaccattccccccaagcagtccccattgtctatcattcgttcccatgtttgtgtccatctaacagtgttttttatctggatggtaggatttgaggttatggccccagcatttccatctgacacatttcctttataaccaagtctaactttatcataaaaattaacacttaaatgtttgggaggtgggcattgaatttgacatttttttttagttgattctgaataattccagtcactgaacccaagaaatgaaaattgagttactctccttccttgaatatctcattcagttgtccacactgaggctcccacctgagttctagctgtaatataatcactagtgagcattcgtcctccctaggtcttactcagaccaccttggtgaggcttagaatgagtttacagtcagcttttatatggtgaatgatgagacaaagcaaaataaattggactggagttgtagtctctcagcagtttcaaaattacaaaatttagaaaaataactttagatgattatgaaaaaacaaaccatttcatgtcagtgacctgtggggagcacttagtgaaacaccacaggctctgtgtagcctcttttccatgtgcgtggacaccatgtgccccttcagtggcccttactggttgtgtgggtaatgggtgtgtgagggagggttcttcccatgagggagatgctgggtgatggagccaaaggctgggattacgtttcatgttaattaggaaggaaggaaggaaagaaggaaggaaggatggattttagttcttgaattacacatctgatttggtgttttcctccttttaaaaaatgtagtagaatatacatagcgtcaaatttactatgtgaaccatttttaagtgtacagttcagtgcattataaatgcattcacattgtacaaccatcaccattgtccttctccagaacttctgtgtcttcccccaactgaaactctgtacctattaaactctaactcctccttcctcctcccccagccctggcaaccactgttccactttctgtctctatgaatttggccactctaggtagcttatgtaagtggagtcatacagtgctgtccttttgtgtctggcttatttcatgcagcataatgttttcaatgattcagtttttctatacaaaaactttcagagattaaagcagtcattctttaaaaaatattttgatttttaatatcacactgtttcaagggggccaatgtcagccactatattatgtatgaccacttatttcagtagtttatatttaacattcaacaaatgttttcctttaaatttgttccaaattcctgtcttggcagattggaagcttacaaaaagtaagaatagtggctagctgtgttttaaatatttgctaaaaagtatacaaattagcctgtgtttataaataatgtgttttaatagttttatttcctgcttaaatttcccataaaattgtacaagwtgacatcataagagttatgtggagccaagtaatggaataaacaggctgatcatgacagatgttgtacatcttttagttagcatctggtagtggagtgggtgagaggtgggagaggtgaggactaagggtgatcagcaaggggatggttatgctacctttcctgaaaatatccaccgaggattcactcagctctcacagcctgtgtgttccacctgtcgggctccatagtgtgagggactcatgctgggcagggccaatttactgggacagagaaacccaccttggcaatatgagtcaagaaagggacaatgagttttgaggtgacactcatggacattcccttagtcccagagtcagaggggttagtgggtagagatggagctgatttttgaaaacattttctctaaagaccagaaagtccaacgcctgaggaagacttcccacttggattcagggcagcagaacagtgccctctctttttattattattttatttatttatttgtttttagagatggggtcttgctttgttgcctgtgttggagtgcagtggcgtgatcatagctcactgcagcatcaaactygtgggctcaagggatcctcctgcttgggcctctggagtatctgggactataggtgcatgccaccatgcctggctaatttttaattttgtgtgtgtgtgtgtgtgtgtgtgkatgtgtgtgtgtgtgtagagacagggccttgctatcttgcccaggctggtcttgaactcctggactcaagcaatccttctgccttggcctcccaaagcactggaattacaggtggaagccactgtgcccagcccagtggcctctctttactggggtggatccatggagtcacaggggtttggagtgggccatcactgtgctaaccggcacagcccactggccagtggatggtgacgttagaagatccctcacattgacaccaagatggggaaggccttgaaagttctgtgtgacctagggcactgcttcactgtattctccttctgcctgtgggggatcattacagggtcccccataaaaaagtagctgtccagactttccatagtccaagaagtcaaagagccgaatacatttaaataaataattggtaggcctagattatccttttcactttaagaccaggaacaaatagaagttccttcccactgtgaaaggtgatcccaggaattgggtcattcttgtcatacctaactaaaacagagtcaagaggccggaggggaaaagcaccctggacacacaccattgctccaagtatgtcgctctctgccagcccagctgctgaagctgcctgctgtaacctgaaaccagttttatgtaatagttcctggaatacctgctgtgactcctaaaactccttttatcccaccaccttacccaccatcgtcactcaacaatcagagcttgcccagcttctccaaacttttctagtgccaatgaactatggcactagaaattatgtttcagctttttataaaactatgtttcagctttttataaaacctccaaccttctatattcttcagatctaccaagaccacccagtctgcatgtgtgcccaaattgcagctcttttctcctgaataaaacagtaaattcagagattagtctctacatttttattttgacattgacactgctttttgagcactgctgtgtgcaaggtgctgttccagtcaccagggattcagggagacatcagcctgcagtcttccaggccatgtagaagtggtgttgcaagtgaatgctctgggggaagctccatttgtctgctctgagcccaaggaggctgccacccagttggaggccatggggtgagggcaaggggaaggcttccaggaggtgggagcacccaagaggggcaagagaaggtgagtagtgatgctggaacaggtagaaacgccagacagaaggacatcctgtgtaaaggcagtgaggggtgggaagggagcacaggtgttcacaaggctgcctgggaaactgcatgtagttctagggactgccaagtacatggaatgggaagaggaagaggtccagacrtaggcgatgagctggtgaaggatatgaaggaagagggtgatttgagtgttgatttctggcaaagtgagaagaaaagaaaatatttaactgagtatgtgtagaggaaaattcaaaatttctgataagagtgtctccagaaaagatgtaataaggaaatttggttagtaaatgagtaccaaaaagcatatgaatatgttggagaataccctcgttcttaggagattcatgctgaagtgttaaaagatataagtgttaggatatctttgcagaaaaaagtgtgtgtgtatgttgagagagagagagagcgcgcrtgtgtgcagatatggtaagatgttaacaaatgttgagtctaagggaagtgtgcgtttattacttaatttttctgtacttttgaagctaagcaaaatttgcagtataaatgtggggctacaagagacattaattgaggtacaccgacttcgtgtcatgccaacacagtttttctccattggtacattttaggcaaaatgctattccatcaaattgcattgaaagtgtttatttacaaaacccaggttgagccacgtctgcactttctgagcatatcgtgatgatcattggtcattactggagaggtttagtagagctgatggacttatgtaataccgatttggagccactaacttaaagtgtgtaattttaggactttcttaaataggacaaatgcttcacatggttttatgcctcagtgggtgtctcaaatataaagattcttatcctattggtagatattttggtggttaactttgttggaaaatgcataaggaattattacattttatttttggatacatgcttgcattcatttgtatcctatccataatatgggactgaatacagaaaaaatcatacagaatttcttggcagactccactagatgattgtgcagatcattattttaaataagtggactttaatgcatagttaactgatactttattctaggagattgtgatgaattatatcttaaagcaatatgtaaaagcttaagtggtcgaaagagaaataaatatagctatttaattaattgtctgccggacaattgtaatgcctctgtctggtgggtggacaaattgaaacaactgattatgcagcattagtaagtgtctaattggatatgtggggtagcatattaatatagtggcacttttagagagggtgtcactggaaatttgtttttcaaatgaccagtccttatttgtatgctttgagtcctctaatatgtggttgtttcttaattgtatatttccttgctttgtatctttccttgaaagaggtatcttttatatttattctgttacccatagaaaatgcataaaaaattgaaatccttggcataaaacttgaaggtgcagactaggtttgatccagtgcttttcaaagtaagtataaataaatgaggtttctggtagtcatcttgggaaattatgaaaaccatcatatgccttctcatgacacatcttttttctctgttgaagacgcatcctattacacaccttgtgaaaatggtgtcacctccctaattgtactctgtaaacaaaacatcccttagttcctgattgtcctggcttactgtggagtgacaggctgcaatttgccagtaggtcaaccactgaactgatgacaagtgacctttctaacactgcaatcaatgcttgttatttggaaaacaaaatgatacagtttgtattttttagcagatgggtcattgggtcaacccaccactgacatgtgaatttgttacttgggctggatgagtcagttcagacagaaatgttaatttatttgaattgatctgagtcttgctcttataaaaaggtgttggacatttgttgatggcacaaattattacaaataattggttttatacatcagtcaaacaaagacttttagagggcccacttgatacaatagcattatatactagctttgggaagcattcaccataatgtattttctccacacttgatatttctcaatggttttgagaaaacccaatttacataagtgatcttgcatgtgtcatatttaaatagtatctctccccatgttgcctgaaatgtgtttggtgttagaccccatgaagagtcaggaggatgattaagttctggaaaaaatgctgggaagagatgaactgtcataagagatagcccctgtggttgtcagcgttgttgaatgactgcttccagctttcacctgctagaaacatgggaacattgggcatctctgttgcatttgacttagatgttactgcacatgctttggctggtgagtgtgagtgaaagtgacatgtgctattttcaggcagaagctgctagaaccaggatgagagtcaaggtgttctctccccttcttcctgtcayggtgactgtggcagcattgagacgcttttagcccagatgcctgagtgaggaagatgtagaaatgccttcccttgcccctcacacattcacacacactcagatgactgcagtgggtgtgtgcctgaatgagaaataagctgtgttgtatatgccactgagattttggagttgttgaatggttctctaactctttggtcttaggactcctttatactctgtaaatgttttgaaaaatccgcagagcttttgttcaagtgggtaatatctacttctattttctgaattakaaattaaaactgagaaagtttgaaaacacaagagtccataaacatctcttccattgggcatsagagcagtggtgtagacctgtgagagttgagcgtgaactgagaataataaagtcmaataatgtcttcttatgatcatgaaaatagttttgaccttgtggcctccctgaaagggtctcagggatttcaggggtctctggcagatactttgaaaacgactgacctaggccatgctaagtgatgagcatacctcgataagttacagttacaggctcagagaagttgagaaggaaaagaaagaagggaaaaagattttggaagcattgcaaaagactatccctgagtgttagggttttctttttctttttgaataaagtcaatataaataattcattcctgtttttgagaagtagtccctctttatactaataaatgcctattttactaggctatcaaatgaaataatgcacataaaattatattgtatgaagycacataactgtaaatattaattctatgaaggttgagattatgaaatattttgctttggaaaaatatgaaagtatgagtagtattcatatacttagaattaggtgtaggctttctggatggtagagggttggagaaagtgaaatattaaaacatatatgagtgagcttatctaagttccatcagtagtgctgcttctgggagttttaacggtgaaattgtcatatatattgtaatgatgaaataattccaaccccttttatgaagtgtgtagtgacaaaatgatacaaaggtggctaaacatgttttgaaagacttgaaaattgtgcttaatggaaatttcatgtgcatggatagcaaatcccataggtgaatagtcacatgcctatcaatagcccaattctgtaaggcaacatatttatttcctaagaaatgagtcctaacagaatttgctaatatttgaaaggcatcatagacaaacattttctgagctttttgttaatatagccatgggaaaggttaccaagggaatctgatgatctttatagatttgtccagctgttatagatagttaatatttaagcttcaggaaggagacctaagtgggtgacctccctagctttttggttctccttttttttcagtaaatacttatgaagtatgtactgtggaatagctgttattgtatcctaccagataaagaatatcttgggctgggcacagtggctcacacctgtaatcccagcattttggaaagccaaggcaggaggattgcttgagcccagaagttcagtacctgtctgggcaacatagcaagacctgtctctacaaaaataaaaatacaaaattagtcaggcatgttggcacatgtctgtagttccagctgcttgggaggctgaggcaggaggattgcttgagccaaggaggttgaggctgcagcaagccgtgattgtgccactgcactccagcctgggtgatggagtgagaccctgtctttaaatgatgatgatgatkattattattaatattgtcttggaggatctatgtacaaggtttctgaggtcacagatttctgaggttagcaaagttgatcaatgctttacttgacagaaaaatcaagcattagaataatgcactgaatggaagaaaagaaaattaaattcatgaagtggcatagacttgctgaagattaatttcctctactaattggctacccattatggtggtttttgaagcctgggactcacttaagaaagggcttgttatctggagtccctagcaggctgaaaacgctaagatttgatagatgtaatcaagacagccagaagtcgctatctgcccatttgctctggctggcatctttaggaagctgaatacatatcattctcctttctcaagtatagttgtgcttgtgcagggaagggttgccttcgctgagagaccgcttatcttcataaaatgcctatattttgttcatatacggttaccctggcactgaaaagagaaatggttgtgtgttgtttcattgcaacctttaagtaataaaagtctgtagttgtgattagtatgagcattcacattttcttacccctgaaatgaggcagtagcttcttttctcatttaatttatctttaataagattgttgataagctttaagccatgccacactttaaaatttcagtaattccttaaatcccccagcagatggagacgtggaattctttgctccttcactggggcctctgctgttgccccaggtgactttgcttgacttctagttaagatgcagtgtcaggttttgcaaatgagctaatgaatatgctcttttgcatttcttttcctcctcttgttggcctgcttaagagttcttacttacttttgcatctcataaggtcattatcattactgaccttccccagtagatacgaacaatattttctttagagacatattctcagcaaagcacagaagagagaatcctctgagctccaggggagcacgtttaaatcccatgtgagcctttcacaggcagcatcctgcccatgttttgattcagagtaaatcccagaggtcagatgctttttcagccagcagggtaaagtttggtcacggttttctgggatcagcatagcggctagagagcctctcctctgtggcttgtggctctgcatacccactgacacaaagaggaagggattattaacagtcttattttgaaagggtcttctgattcaagtgattatttttctttcctccctgattcacttatatctattttacgagtattaaagaggagatctctctaagacttatctttgacaaatgcaataaaacctttcaaaagtattaattggtgtgaagccctttagaaagtcatgccatttgttgcatttcctgcctttattgctatttctactaatcacctgggaaaaattactggtttttaaattcttaagtccagttctttctaagctgataaactttctcccagtaaattaaaaagaaaaggaaggtaaccttccgaggtagctcatgggagtggttgctaactcttaataattgaaaatgaaagttggttttaaaaaaaaaaacacatatgcaaaataactcaccaaacatgaatcaataaaaaacaaattgtgataaaaggcatgctctttaaaggagctggtagtttgtcatgtttatttattttttattataaggctttcttcattatttgaagactcatcttacaaatgtgttcttttccaagctaaataatgaattacattcatgtaagacatttttacttaccttttatgccattataagagcaaatgacatggttatttcatatatgtctatcgacttactgagatctgagaataggacacatctgaattcagtaggccctgtggtctagatccctttttttttcagattaaagaactttccaaagaaaaggaaactcttkgttttttgctaagaatttacataatagaaaaaacgtatgtcttggtgtaacactagatgctgtgacaaataaatctcacaatgtcagtaacactgtggacctttatttcccattcacattatagtctattgtggtcccagcttggaggtggttgggttgggagcttgttacacatagacatcctggttgaaaaggactctgcatcttcaacatgtattttccaagattctagatgtcaagtggacatccasatggcacaggaaaagtccctggaggatctgtgtggaggtttctgtgggctaagtctggaagtggagagaaaggcagctgggagtatggtttagttggatgcacagaagaagaagaaaaggacatttgatgagtagctggcaacttctgccccacttggccttagaggttattacttaataaaatggtcctggtaaattattacaggagaacattatttaaattgaatataatgattacttttttgttctataaaggagtgctatctttaaaaatccaattaattgactaaaataatgttttgagaattaactttatgatgttttgatataaaagtcaagaattaatccataacaactagatcttacacaagtagattttttcctaagctttatattattaaaccataccctaatattttcataaaatattctcttcccttaactctgataatttcccagatagagcaaagatatatgagcatatattgctacttaattcagtaaagcaaatatcattgaataaatgtcagcttttccagggaaaccactgcatataacctctctggataatatatttatcaaaaaatcaatactaaaagtaaacggatttttaatacatctgaaggagcttcttaataaaccaaaatgctaacccataatttaaagctgttggtaccagtaggtacttagagatgacatcataatttttgtagattattcttcatagtggtctgtatgctacatttaattcagtttttactttgtgctggggagatgtgatttattttagaggcatgtaaagactattctggcttctctttccacagaggaaaaccccagaaggtgcatgaagagcctgtggctcttctgatctcttcccttatgttttgctctattcagtgccgggtggttttgcctgttttctcctgtctatcatccctctgaaaacatctgcttaacttccccgggctcataccccttgttatttgggcctgcatttctcaaactcttgctatccattgattatatgactgacacataatacattttttaaaaggtcaatcacaaattttaaaataatttttgaaaaattgtattttaaattaacaaaagtgtttttttgtttgtttgyttttgctttttattttgagatagggtctcattctgtcgccagctggagtgcagtggtgcgatcacggcttactgcagccttcacctccccaggctttggggatcctaccacctcagcctcccaagcagctgggactacacaacacaacactacacctggctaatttttttgttttttgtagagatggggtctttctgtgttgcccatgttgttctcaaactcttgggctcaagtaattcaaccaccttggcctcccagatattaataaaagtagccttttactagtgaaataatttttttaaattttattaccaagttacctacatagatggcccttgagatttctttctgcagactctgcaaggaccaaatcaaggaatgtcccacaattaaaagctggacatttggatatttcaacttggagataataataaatatattcccagaacacagtttgatggcatttggcttgtacattttattgaagtgttagggtgtggtttctagttatgttctgtcatatgcccaataggaaggcagctgttagcgtagttgttaagagcaccctgacttcacctcctcactacgtgacctcattcaggttactgacttctctgagcctcggtttattcgtctgtaaaatggggaagtttatgactcacaccgtgatgttcttataagaagtaaatgagagaatgtgtacagagcttaggacaatgtctgatgcagaatccaattaatcattttcttttcttatgggtamtacttttaatattgtatctcacaatgaggagcactttctcttatgttttctcttaaatttttttcacttaccttccttctaaatgacaatgttccactgtagcaaagcagttctccttctccatgcacagtgtacttgaaatgtggttatttggaaatttggctaaaagttggttattttccccattcttccttattcaacagtggctcaagatggggaggattattgatatggaagggaagtggtgggaagggaagggtgtggtcactggagagagcttcatgcccggcctgtgctcagggacctaggtgaggacaggcactcctgcctttgtgcccaaatgttgcatttcctaagaccatcctggcccaccacacccccatcttgtccctatgaaaaccccgagacctttgcaggcagacacacaagcagctggacatcgaggggaaaacattagtggaggaagacataaggggctggaggtcaagaggacatcgaggggaacatagcggcagaagagcacaccaccagacactggcacgccttcggcctacggaacgatgcggaggttagcctggggcagttggaggagagcctgggccactaagtggtccgactccaggggaaaatcatctcccttctggcttccccatctgctgagagctacttccactcaataaaacctcgcactcattctccaatctcacgtgtgatctgattcttccggtacactaaggaaagaactctgggatacagaaatccctctgtccttgtgatagggcagggggtctaattgagctgacttaacacaagccgcctatggatggctaaactaaaagagcacctgtaacacatgcccactggggcttcagctgtaaacattcacccctagacactgctctggggtcggagcccctcacactgcctgtctgtatgytcccctagagattggagcagtggggcactgaagaagtgaactactccccctgtcatataccctgggagggggacaagggaaccattcccgtttcattatgatgttgagttccacctgggtatgtcgtggtgtgagggtgaggacaagaggaccatagggcccaagtctcatcattagactttccacattatcttccaaaaaggatatactataagggatagagacttatgagtaagattaaaagtagaatatgttcatcatatcgccaaacctgctcaatcacactgctgacagtgtaccaagaattagtatttttagtgtactttttagattgtgagtagcgtaactatattacattataattgttattgtttgaagtgttaatatgttaaacatttaaagtaataccacttaaaaattaaatcttggcatctatttaatatgccagggacctcacaatagaattgaaatggactcttggacctcaagttgccctgtaccaactgttccctggggataaatcaggtatggagtggtagttgtggctgtcagctccctccacagatacctggccagtgctccagtagcaccaacctcagaggactgttcccagtctacatcctggcttacaaaagcgaagctcacatatatttaaaagatgctcttctctcgtcaaaagatcaaagttgtagagcactttttccttgtgatcaccagatgtactaagagctgattcacgggcttcactcaggcgtttggctgctggcaggtattgtggatcgtcgttgttctccatcgagtgcctctgattttctgttgccattgtattttggcattagactggtggccagtggtgtcatttgatgtagraattctgtcagtaagctcttctatcttctctctgaccgtagcctggttcatcagcctttcagctgtttttaggagcgtctcagagtgggatctgttttttaaaactctgaggagatttttaaacctctaaggagaacaattttgaatggtgcctgtgtaactcagggttcttctctttctttcctgacaacattyttaggtttatagaagaaattaattgtgcttgttytggaaaaaaaaaaaaaaagctatattggagtacccagagaagccactttgagactttcgtaaactctttgttatgtcwttgtttgtgagagtgttatgatggtcagtttacagaggagttgaggtagatgcattgcaggtcaagttacatctgacctttagctattcatcttctgccttcctattggtactttctctattttggcaaaatctatgaaaccatccctctttgaggtatttttgaatgaacacatactartttacattgtatatttgtatcacacaaagttttgttcaccaagatattaccactatttttatcgcattttttctttctttctttctttttttttttttttttttagagagacagggtcttgttctgtcacccaggctgaaattcagtggcaagattatagctcactgaaccttgaattcctggcctcaagcaatcctcctgtttcagcctcccaagtagctaggactacaggcatgcaccactacagctaatttttaaattttttatagagacagagtttcactattttgcccaggttggtctcgaactcttgggctcaagtgatcctcctgccttggcctcccaaaatgctaggaataaaccacttttgaaacaggatttgtttttttgaatttggactcaaacaccacacagcaataacaaagatggtagatttaacagatgtgattagtaacaagcagatgatgtaaatacacattaacggatgttcactggtgattggctgaacctgcagagatcagtgcctgtggatggcaggtgccccttatgctcacacaagtcacaggccaggctgcagatcacagtacagatcccctaactttgaattttgaggaaaagaaacacacacatgcgtaacctataagagtaaacaaaaatcacttgcattacnatgcaaacttagaccacatggttcaaaaagtgtgggcaggagggcatgggtacactttttaccctgcctttgctggagccaattcattctgggagagcagcgtgagagctcacctcactccacagcaggtctgagcagggtacagcagtgtcacccaagggggtgtccctgataccgtgggccattcccagtggtaggggagcaggccaaatgccacagtcctctgaggctcaatggctcttcaagtccaccagacttagagcagtggagtccaagcagctctggatgctgttgtcaacctccagtcacatcactgggttcagattcacccccacacccgtatcgccataacacaatgctttacaatctgaggcctaatttagccagtcatctggtgaccatctcaagggacctttgtccagtggtgcactgagcctgagcatgccagcctaaaggggaattttcttgtcatttccctctggatgcgtgtatatagcacacatgtaacttttagggaccaaacaattattaccaaggtgactgtgaacatcatgacttttcttatatttcacatctgtgacacgtatgcagtggctgcatcaccattgggggtcaccagatagaggtcagtgcttcatgatgccacgtgtccatgacagactcagctccactcatgtacctgtcctttttcaccctgagcactggtttctaggttctctaaaatgaagatgaaacgcctacttgagtcgagtgtctagggctgggctttaatcagtgcacatggcctcatctcttgtgaccctgctctactgtcctgaagcacatgcaggtgcctggccttgcctgcctccctgctgtcactgctcatgacactggtctgtgaagcctcctgtcctgtcctgaggtccaccagacatttgctgtttgtcctttgtgctcctgttgctttgtgtggagattaacaaggtgctgcctttatttctctattgcatttgatgtgcccatatccaatgccagcctctcttctccttaagattagggtgttcctccactcagagtagcctcatctctgacccttcagtttgtttgtgtaacgttgcagtgatcttcaacattgcagttgaagatgacaatgttgaaaakagataattttgcagatcatctagatggcttaccagctagttagatgcatgtgaactcatgtgggcttttaggctgttgtctgaaaatactcaattgagcataatcctcacttcttctggccttcaaatgtgggaaagcagcacccaggagaatgtgctgtgatgacagcagcagcagaatccctggaacrtcgagttcctagaagattgtctttttcatagcaagggcctggatgacacctgcagtgtttcaggcaatctagtgtgttctttagccacagtcttgagagctgctaatcttaaatttagggtctgcagctgctgctgccagcactggtggacattccttccagctgcagaatcccctctagccactgggatttaatttttaaccttgatatctgccttgacttcggatgtccctgtgctattttcattgaagcaggggaggactcttccattcaagttaggactctctaattagattaattaattaggtcttgtggtctgctggtgataggtaccctagggttagaggtctcccacttgagtgacagagatgagtgagcttgtgatatgctatctgtgcaagaaagagtaaataaaatacccacgagggttggtagttcaaaaatctcatggagattggtagcacaacaatgtgaacatacttaacatgattgaactgtacccttaaaaatggttaagatgggccgggcatggtggctcactcctgtaatcccagcactttgggaggccggggtgggcagatcacagggtcaggagttcgagaccaaccttgccaacatggtgaaaccctgtctctactaaaaatgcaaaaattagctgggcgtggtggcaggcgcctgtaattccagctactcaggaggctgaggcaggagaattgtttgaacctgggaggaggaggttgcagtgagtagagatcatgccattgcactctagcctgggcgacagggcaagaatccgtctcaaaaaaaaaaaaggttaagatggtaaattttgtgtgtattttatcacaattacaaacaaaacttcttaaaaaattacctcaacacctctcaatctctttcagttcagctctgatttttgttttttctttagaccatatttttgtgcatgatgtgaaataagggccaaattcattttccctcttcctttctccttctctctccttatgtcttcttaacactctttttgcttcctgctaacttccaatatggaaactcacattccccaacaccgtaatttaaaagacgattattctctgttctgtacctttgttaaataaatgtaaacacataaacatatacctatatgtatttatgtatctgggctcctcattctgttccattgcttaatttgtccatttttgcaccggtaattacacagacttgacaactatggttgtatgctgtgttttgatatctgctagaccaagtcccaccttgtcccttttcatgttaagagtatcttagatactgttttagtctgtttgtgttgctataacaaaatacccaagactgagtaatttataaataatagaaatttatttcccacagttctggaggctgggatatccaagaccaagttactgatggattttgtgtctggtgaaggctcactgcttccaagatagtgccttgctgctgcatcctcacatggcagaaggaggaagggcaaaagggcagatggagctctctgaagcttcttttataaggacatgaatcctctccatgaggacagagctttcagggcccaatcatctcccaagtgccccccttcttcatactatcarcttagaagttctaatatatgaattttggagagacatgcacattcaagtcatagccaatactactggcatttccatgtgaaccttaaagggaacttgtcaagtaaggctttggttatattaaatctatagatcagtttgggagaggttaatgtctgcaatatatcatgtcttttaatcagtggttttgatatccccatttatttagatcttcttttttcttgctaattgaggcatgaatatatataccttttaaagaatatatataatctacttacctgataattccttgaacacctttggttagatttattcttgttagttgatattttttgatgcaattataaatgttgtctttttaaaaaaaatgttgctgatacatagaaatgtattctacatttttatgttgaacatgtatcttcctgccttgttaacttcagttacaaattctttaaggttttctgtagattattctgtaatttttatatgcatatataacatccttattttrttcctgatcttaaaaggaaatatttccatgaaacatcattaatcattaaataatggtatttactaagatccctttatgctgtccttacctttaactggggtacaaggcatggcagtatctgtgaaagtgacaggatactaccctgccctaaatctagtaagtattgtgggatatttggatttgggcatcttacaaatatgaatctaggtgtatcctaagcaataaagttgtcccagctactgcaagcccacattaattgtacctattactagtatgaacattggaaacattaaatcccccccttcagttgatagcacttacgttaaatagccaggtgagcgccaaagcatacactaaatctattacagcgctgcccaatgtcatttttggtcatggtggaaatattaacagccatgcattgcttaaccacagggatatgttctgagaaatgactgaaaatatgtttatcagtcttttgtttataaattcatgtttttcctccaatgcaatggaaccttgtgcatgatactgggggcaatggtaagctcttactactctaaagggagtggctgagggcaaggtcagatgcatcagagaatatagtaaataagtttcaaagtktatttgtagccatcacatgcaatacaaaataacagaaagcaagttgtcttattaatttaaggcacccagtttgacaggttggagtatcatgtaatggacaaatcaaataattgaataagaattttcaaagaagtaatccawatcttagttatccaatttaaaggttacagttggtcatatagtcatgtgtcttttaatagcagggatacattctgagaaatgcattgttcaggcagttctatccttgtgcaaagatgataaagtgtacttacacaaacctagatagtagagcctataagacatgttggctgtatggtataccctattgctcctgggttacaaacctgtacagcatgttactgtactgaatactgtaggtaattgcaacacaatgataagtattaacgtatctaaacatatgatggcatagaagacttagaaaatatggcatgcaagataaaaacggcacagctgtatagggcacttacaatgaatggagcttgcaggattggaagttgctctggatgggtcagtgagtgagtggtgagtgaatgggaaggtctaggacattacttgacactactgtggattttataaacactgtgcacttaggctgcattaaatttatttaaaaatattttcttcaataataaattaaccttagcctactgtactgttattttataaatttataatttttaaaaaaactttgactttygtaataacacttagcttaaaacacaaacatacagctgtataaaaatattttctttatatacttattctataagcctttttcaatttttaaaaatttattgatttttttctttactttttaaacatttttgttaaaaagtaagaccaaacatcttaccctaggcctagaattggtcactgatatatcactgtcttcaacctccacatcttgtcccactcactggaaggtcttcagaggcagtaacatgcatagagctgtcatctcctaggataacagtgccttcttctggacacctcccgatggacctacctgaggctgtttcactttttttttcatatgtagaaggagtacactctaaaataacaacaaaagtatagtatagcaaattcataaaccagtaacatagtcatttattacctttatcaagtattatgtactgtacatgatgcatgttctgtatttttacatgactcgcagcacggaaggctttttacactagcagcaacactaacacatgagcactgcgttgcactatgataggatgactgtagtgtcactaggcgataggaatttttcagctcccttaaagtcttatgggaccatccttgtacatgtagtccatcattggctgaaatgctgttgtgtggtgcatgattgtatatttgtgctgtccagtatggtagccactaggtgcatatgaccattgaacatgaaacctggctagcatcactgaggaactgaagttttaattaataaattttaaatttagataggcagatgtagctagtgcttactatattggagagtatagtggagaaagtacatttagaaatatcctatgtccttccttctcttagggatagcagcctttgggcagaagaactttctccttctcccctctcccttctctgaggttctcaccgaccttttccagtttgccgcagctgctaagcttcacttgccacttgtttcctgaggatcatcaccttgggcagtccactcagcctgtttcaccttctgactctgtttgctcagggtcccgctgctgcctcctgtgtccctaaagaaaggagtaaatgtgctctctctttccaaggggccactactgggtcagggaattgttttatttatttcacccagtaaatgatttcagagctttcaaagttaagggcagaggacggtaaagatgatgccacatcacctaggcaaggttgttggaactccagagggttggatggggtttgttcatggaggattaccactgagacatggggacagaggggagccctggtgacagaggacaccagatactcgttggcatcagcatttaagggaaatgtagtttatttctgccctgttttctgatactttaatatgacagcccactgccgttattacaaatgtgtagtatttaacgctgtattgcaatttggaaagactcctagataaatctgaacaagcgattatgtcactttggaatccgatttcctagtaaattgatttttttcctgcaataagaaagctagtatatttcatttctacagaaagtatgacatctttttattgattctttgattcagtcattgataacatcattcactcaacaaatgattattgaaaaactgttatgtttcatgcactctgctgtgtagaatatactcaaatgtaaaaaaactcagggaagttacagtttactggggatatagacaaataattctaattgtataatggcagttagaattatgggatgtcaatgctgggtaatacagagtgttacggaagcatggaagaggggaacctaacatgggtggtcatacaatgcttcagaaagggggtagtatccaatctgagaccaccagaactgtaagcatttatggtgggaggatggggaaaggaagaatgttctagataaatatattggyaggttattgctgttgtaacaagttaccacacactttgtagcttatattaagaaaaaacttcttatcttactgttctagagactagaaacccccaaatgcatctcactgggctaaactcaggaggttggcagggctgcattgcttctggaggctctcagggagagtcagtttccttactttttccagcttacaaaggctgcttgctgtccttgggttgtgcttctttatcttcaaagccaggagctggacatctttaaatccctaaccctagcctcttgccttgttcttccacttgtaaggactcttgtgattatgtggagcccacctggataatctccccatctccaggtcagctgctgagcaactttaattccctctttccatgtaatttaacatcctcatgcattctggggattaagacacggacatcattggggctgctattattctgcatactacagcagacaaaagaacaaagtatgtatgtagagctgaaataaatttagcatggctgaaggttagcccatggggaaggagatgagaagagaaggggctgaagaaggaagccaggtaaaaatgtgattgaatttcattctaaggaaaatgaggggctgttaaagaatgatattaatgtaattagatttgagttattgaaaacttcctctacctgcatttggaggctcttcacggacaacacatgcctacttcactgactataaattgaagctaattaacttagaattatcggagcttaacccgaaatctgagatagtaaagaaaaaaaagaatgtctgtatgtgtaggcagaagatcaaaaaagcaattctgaaaagaatttgattacaggctgttcaagatattgatcaatatttggatgaagactctttcatctggtgaatacccaggtgagcctaaacttacacaagaggatttactggtttatgtaagtgaaaattccaaaggtactcccttaggtatagcagagtccagaggctcaaatgatgccattgctgctctcctctgcattgacttcatcatcggttggggtggactcttcccttgtggagctaagatgtcagcaacagctgtgggctgttaccctcctggatcacacaccccaacactgaggggggtgggctggcagtagttcaagtagaagtcctggagttgagtctcaytagaccaccttgagttgtgtgttcatttctgagccagtcactgtggccagggagatgtgatcttgggcaggccggagttaatagttgactaccctgctattcaggcaactccgaaagcttgcttctgtaaatagcagtatgttttgagagccgggctctgagctttgtaaccaaaattcaattaaaactgtttaaatggggccactgtgtaaatttctttgtcatatgttattagtatggatctaaaaacctatcatattattgctgttctctgattgttctctacagatgggcctggatttgaaatcttaagatgtacatgtctatgttctgtcaaattttcatttaaaatcagcacaaaggcttttggtaattgacatcatttgcctgacttcgaaagtggaaatatttaattaaactttatataataatgaaagaaaatcatgcttttattttagatcactttcttcccttgagcaactgactgtctctttcagtctttgtcagcagatttaatctcacttccagtaaatgcttttccatcacattatcttcattaaaatacagatgttcattagaatcatcccatgttctttagacattgagtacgtaatgacattctgctcccagcatttctgtcatttgtgccttaatgtttgtaaatggggcatctcttttcttttaagggtacaatttcagattgagccaatggaaaatatattcgagtgtggttatttccctgattggctttatttatgttaaaagtgacagaagcacttgaagtcactcttcgtctttatcctcttcttctcagaggtgctgctgtttactactcagccttcaccaacacatctctgcagatgacttgaagcacatctccaaacctgacacatttttctacttccatttccagctttgtttttcacataacagttttgtgaacttaacatctcttaaaccgccctcattatctctgatgtctctgctgtgctgacatcccacgttcacactctcaccacagctcatcatttcttctctagcagtttctacccatttctttccagaatgattgctaccaactatttagtgccttataagatttctgaacctcttcaataacctgctgtgcttctgtttatgagctctttcacttccatcttggtacaactgagataaaaaaactttctaaaacactattaaagcttgaagcgttttgagagttgagctttatattcccactccttcttttgacagtaggttgagaagcaatttttctcaagtattaacccttggtgattgtattatttactcaatacttacttgttctgtgtgcagctgtcttatcttttagtctggactgtaacttcttggagggcagaagacatggtttatactttcctgtacgaagtgtatacagaactgagtactaatctttataaaaggtaaatgcttagtaaatttactatgaagatgataaaagggagttttgaggttgaggaggctgtctttttttcagaatggcagaatcagttaaaatggatagcacccttcaatcctaaatcaaagactagaaaaacataccatatttgtaatgttaaaagtattttaagaatacgtactcaagcttaaaatcaagaaagggaattcttcaggtgtcagaaatgaagagggaggccacagcattgaatggcaaggggaataacttgagaagatctgtgtagtggggtctacagttttaagcagaggctgcaggctgccagcctagtggcataccagaagtgggctgagacttgggcagggcactcccactggacatactctgaactgaacccacagtggaaactgggccctagctttcccttttctgtttgatgagccamattttcattgtgtggaagaaccaagctcagraactaatgtcaaatttggtctgcaaattcagacaccccatatgacctcatcagggatgtctccacaacccaggttactcaagggacttccacgaggataaaggattctgaattattatgagctcacagacaaatattgcaagcatattagaaaatccactgggtgatagctagtcagcagacacagaaacaagattaatcaattacagataataaacactaaaggaccacaacctgcaaggaacaataagggcattaaaattaatcacagactaatttggggraaggggagtctacaaattaaaatatagcaatgaaaaattttaaaaaatcaattgactgatttatgagcaaaaagggcatcattgtcttggaaagatggagccacaaccacattctgtattattttgtgcagtgcagtgctgggctgtggccagagactctggccgctctgtggagcgcaggcaytgctggtggtaaggacattcttcatttattttccccctttctctttaaatttagatgaccttattttagttgcctttgtaatgtggaggtgaatttataatctttgtttacaaagaacagggtaatacaccagctggtaagatgatgcaaaagcctaaaattgtgctagtgatggaagggagaacctatgggaagaaggttgctttttggaagacaaaactttgttttctttttctttttcccattttccctgactgcattgtgttctgtgccagaggtttgtggccctctgcctttcccacctccctttggggtagctacaggtagtatctccttcatctgtggcacctgggcagtgctttttttgagagtcttgctttgggcagtggtgctcatcatgaaataagcaattttcattttgtatcctagatttttctcctatgctagacctgggtctgcttccaagtgttcacgctttttcacggatttcagttttcaaagttggaagtgttgaatgtgttttcttgtagtgctgatatagagtagatttgtgatgagatgtttactaccatgtctcttccaggaaagactcttcttacactgccatggaacatggtcagcaaatacagaaggcagaaacagtaaacttcctgtaagctaacttgactaaagtttattaaaatgcaggatattcagctgttctttgacactttagtggttgctttaaattaaaaacagctgatacgcataggtttttaagaagcttgttcttgccccatccacaagttcttctatttatccaacccccaccacctcccgcccatgttgtgtgtcccacaataagggatttctggatgtctaattaaagttacttaaatatcaaaaaggcagctagaaaagaaggtgtgtctgtgccactcatgtgattgcctgcatttctttttgttgttgttgtcatctaagtgatttttggaagcccccaagtgaaaaaacaagtgcaccactctgttgagaaatgaaagataaacatagcataattggctaagactaggatcatgacgtgatgtgtgcctgtgtcgtattgctgacgtttatgtggttgaagaattacatctaagtaatatttgaatatatgcgatttttgacttcataataattgacgcagtgtgggtagartctatgtaatgttaccgttggttaaatgggtgtaggttttgccccccataatttaccctgcaggtacaaacataaccttttattttttactcctcggattcgtrgctctttttttctcactccagagataaagtagcatatctttcctgctgtccaaggaagacgagtgttcctgtgtccctgcgtcttatgcatattcataacacactgaaccctggtggttgtgagcgatggatggagcttcagggattgtattataggcagtctccaaaccgtgtgtttgccaatatttctttgttcatctctatttcatcaaatctgtgaactagaaacaagattgacagcatggaattcaattttccctttccgtgttttctggcactcccttggataattagagccatgtgatgaagtggtgcagacggaggtggaggtggctgagggcacagaggagaagcagggtgggggtgctggtctaggaggcccccctccatccatgtagaggcgagttagatttggtcttaacagtggggaaaatagaacttatttactgtgagattccacccagtaatttctgggatgaaatctgtgtcttcttaatttaaatggatgaacctcactgcatgtggaaaacatagcctgcctttcttacagaaactctgcctttgtgaggattaaagcaaagagttgtcctaatttttaattcttcactggattcaagtcataggaaatgagcctgaatttggtgacatacttcagatttttttctgttgtgctcaatcttattgtttgacaaaggactgaggttgaactgttgaagttacatatgcaaaatcaaaagatctcagctaatcttgaggaaagtttttgatgggttggataggaagttaaactctaaatataagaaatgacaaatgtgttagaatagagaacattttattagcttattggtattataactgtctcctgagtttccttcaatgtgtgactctaatattctataatattcaacgtgaatttgcagtgagtataagatgttcacatctgatttgtagcacattcctcattggaagaaacataagcaatacagacttccagattttaacracaacagtaataacagctgctgattatggagtacctgctctaagtcagacgccctgggaggttttccccatgaatttaattctcagcagtcattacccacatgtgacagttaaggaccctgagacttgaggaggctaaggattcaatctcagtccctggagctggtgrgtgttcccatgaggcttctagcctggctttctctctcatcagcccccttcatcacctggtgttttccaggatgccggtaggaggcggcaggcaagagagtgaagctctctctccagggcttggccraattgctctgcttctctgtgctctattttccatctgcaaataacagcacctagctcatgagtagggctccatgagttagttcaggaagcgagatttaaagggtcaccaggcacacaggaagccctcagcaagttcacggtcatgtaggtttccctttcctaccccttccatggtcagctgctgggaccgctcttctcccctagaccaccgcactcacaccccttcttctccagcccaggtgcactgtcatgtgttgscctttccaagacagggtgcaggggaggggataactctgcctctgtagctcctcggtcctccacgtggccactgcccctcctgtgttaccatgacctctcctcctggcctcagctcctggcctgagggcccagcgcctcctttctctgcatttcctaccgtaagctcatcctctgccccaacacccaccctgttgtgattaaatgctctggatacctgagcccctttcggtgttacagtgatgttttactagatcccttcctgtgatgtttatcttccctttgagtttaagatgataagrggagggtgatggtagactagggaggaaagaatgagaggattaaaaagggttgggaacagaagacacaagtgccttaagggataggaactataaaattctgaagaaaacctctaggtgtgttcctgtttcagggaatatctgcaatattacattctttgacaacagattgtccagagagagtgattattcctgagsttctgtgggacttggtgagtttggaataataggaggcaggtggaacctggaggtggggttgggggagaggcaatgagagagccagctggaatcagaaatacccagcttagggatctgcagtagccaaacacccctcgcacctacccgctgcctttgtcaccgcccccaccacctttctcgagctctagtccttgttcctctaggccctgggaactgccctttggcatgttgagcttgagatatgaatgaagataggacctcaaaatgcaagacaaactgaattttcccctggtagygttttaatctggtagttggtttctgttgtgcatgtgttactgtgctaactgtgaggatacagtgtgttatgttgctcattatgaatagcctggggatgcaaattacttgaagtacatagttttccttaagaacatttattatgatttctatatagtctgcttacaaatgaatttcttgagcaaagcctgtttgtaagcagtggatgtatgcatttgtgcttgattcataaagcattagagttgcaatggaaataacctgagccttagtttcctgagagacacctacttagtagcttgtgtgtgttggggagagactggggtggggggaggagggacaaggatttaaacagagatttgaattgcactgtctgtgaagtttgcaggggggcattaaatctatggattaattcaaacaaaatgtctcatgtatgtaacctttataaactgtgttgtatttattaagcctattttatataaattcagcttcaactagagggttattctccatagcattattttttctattgaaacatacagattttaccaaaaccccttttcattacctttaattctttctgctaggtcataggcaggattttgaattatgctattaatttaacttcattttaaatgaataaaatcagcacatccacagtttggatatttttctgaacgattgaatacttgttttattttatcctttgcccagtaattttttttcaaccaatattgggccagtggccaccagtcatattgcagcataggcaagcagtgtgcctcatgaaataatcctataggaaataaaatatgcaaaaatcaataaggtttcatggaacagtttctgcaaggagcagaaaggcaagcgtggctcaataaagtggcaacagcctgtgacaacaagcctggaactggtttccatcagagacacccttttactgagcacagtgaatatttctgtgatatcctgtccccatgtagcaggagcattttgccctggttgcacagtcccagcaaggggctttgcataggctttgcacaggatgcttgggagactcaaactctctccccaccccgagatggagtcttcctctgctgcttagcatggagctcagtggtgcaatcatagctcactgcagccttgatctctggggctcaagtggtcctcccatctcagcctctcaagtatctgggaatactggcatgtaccaccaagccgagttcatttttttatttttttatttttagtagagataaagtcttgctatgttgcctaagctggtccaaactcccaagctcaagcatttctcccatctcagcctcctaacatgttgggtttacaggcgtgagctactgtgcccagctgaagacttgaagtcttgatgccaaagggagggaggatttgttgtctgctctttggtattcctgagagtgacacatggggctgggttctctgtggcactgttatataagtcaagcagatcccttggaactttatgtgggaagtgttgttgggcaattataatctatattctgaacacttgaaagggttaatataaccagtgtttgggcatttgggtggtgtttgcacatatatggcagcctcttcctgagagactggatagattaatacccagaattactttatgtaaagttttccaggrtatgttattggagtgaatttgaactctggttctgaaaccttttatataatagttatgtccatcaaggctcttgtgcactgattcttaatcaagaaaaaatgaattaaatccccttaaatgaattaaacacattttcaatttgatgcgttattaccaactttatctctgtgataacaatattggatgaagtaggcattactgagtgactgacacttctcaaattcccagttyttctctgcccatcattcacttcctttaagtattacttttttccttatttcaggttttcaagtgacttctgacattttaaaaaaccggttttgatgaggccatagattctcttaggtgcattgtgcactgctgttgctcttccttttatctctctccttccataagcaggasmatattttataagctgcttttctctttctagtcgaggtacctggaggcagccccattcacatttgtgggactgatggtgaatggtattttgcagtggaaagtgagcctcttaggtcttaagctccatgggtttaagcacaggaggggcatgagctgctccaggaatctcctgcagctatttataaaaagatggactctttctcttccctaggggacagagtatgatggattgtcatggcagtgtgtgaaaataaaactctacaaagcagcacaggagagctgtgtaatcagtctggaatttaaaatatctacttgccaacttcaccagtgaatgttgaaaactgagacttggaaagtttttttttttttttctttgacagcaatacttgttcaaagtgcactggcttatgatggagaaattgggtctggatggtctagctctttgaagagtgaacattaagtgccactgcacagtgtatgaatgaggcatgaaatgatgccatcagagcagcagtggcrcagaggtgctgggtggatcttgtcagtttgaggttgaaccgaagcacagaagcacagaacagggtatgtctaaaacctgacatggcttctttgtgctattcatgtgcacctagcagtgccttagccacctagctctatgagacatcatgctgacgaattacccctgtgacttacctgtgtgcaggttatgcccactttggtgatgtttcctttctagagggtctctttctcttgttctgtaagagacaaacatatgccagtgccatgttcttccatagaaatgaaagtacgagggataaatgagtgaggggaatggcagagggaaagaaaatgtgaatgtaagggtacagtagatgyacattagtgtgttgtgatctcagtgcagtagattaacgttagtgtgttaggacctcaaggagaaatttaatagctgaatcattgctgagattgacaaagatcaagtgcttggaaccggtagccagtaagactatttctcaaagacagagtgcatcatttatttctgggctctccgtccatgctgcagttcagttattgaatatcctttaatgcaacattcttggtaaccacgtaagaaatactcaaatattgaagacagaggacctggctccagggcacttatcatccagatgtggacccccttcctattcatcctgcttggaacttcgtgggccttctggaccgagaggatatgtgccttcaactctgggtacttttcttctcttatctctttagttttgtctgttaatttctctatattcttttaagtatttcttcttaatttttttttcatattaggcatatgttaaaacttctaagttcttgcttgtcttaactttttttttcacattttttcatctttttttccccctatgggagatgagttgtcttgtgggataattctttggctctgtcttctagattactaatttattcttcagctgtatcctttctcctgtttagaccaaatgttgtttttcctcatttaaaaattgtctaaaaatttcagatcacctttaaaaaattattattaacatggtagtctatctattttcagaccccttttaaaatctcctcttcactttaatacttatttactaaagcattccttatactattggttatatttgctgcttctctttcttggtcttcattttcttcaaatatttaacactttgtggttgtgtacacatctccatgcttgacatctgatggtatacaacttgtgaggttatacttgttttcagctacttttctatagggattgtgggagatgggtgctgagaggggtgtttgcctgtgctgtggggatcccygttcttccagggtcttggcagcctcctgcaacaaacttgctggggcctgctgtgtgtacacactgtatcaggctgggtgtacctcgttaagcacataggtggtaaaataagtaccacggtaaaattatggcttagggctcagggtaaaattataaaaaaggaacagattacatcccactgtgggcaataagaaacactttctgcaggattctgagatgggcctggaagaatggatgatatttcaacagggggtaatgaggaaatgcagtttcggtgtgggcacctgaacggacaaaaggacaggtgtcatggaaaacaggttctgggaaacctgcatcacctaattcactggagagggataatagtgatgctataaatagcaaatgaagtcagttgggctcttatatgtgttgagcaccaccatccatctgaatagttgcttaagccagaaaytggggagtggccccagctgcttcttccttcccttcatccagaaagttagcagttcctggattttcctcctctagaatgtccctcaaacctgtcctcttttgtcttttctcatgtctgccacacttgtcttagtcattagcgaaatatccacattttatacttctgttttgaaactgacggaattgtcccagaaaactgatgtttatggtttcttttaaataagtacagaaatttaccctcccagtcttaaatcttgagaaagttacatttatcttatctgagttcctttttcaggaaaccaatcatcagtcctcccagtcttaaatcttgagaaagttacatttatcttatctgagttcctttttcaggaaaccaaccatcagtcctcccagatagtatcaaggaactgaaactttccagatcacagcatcaggacagtgagacaccacacccctcacccaacatgattgcctagcccaccacctactgcctgttggctaactcctcttccttaccctttcctggtcttgttttcccacatgtcattacrtttctttcctgctgtgtaaatccttaattttagttggcttaggagatggatttgagactgatctcccattctcctctgccgcagtacccgaataaagcctggcaatactctttgtcctagtaattggcctcctgtgcggcagcagtgacacctatctgtaccatacctttgacgctttgggggcagttctgtgaaggygggaaaattgattgtggaataaagtgatacatttggtttggggcatgtttctatcttattaatagtatatttttcctcatagagatgtctactacacagttagaaataaaggcctaagctgggcatcattgcccttgcctgcaatcccagctactaggtaggttgaggtggaaagatcgctcgaggccaggattttgagactgtagtgtgcaatgagcatgcctgtgaatagccactgcgctctagccgggcaataataatattaatatatagatgccctgtctttaaaaaaatatagaaaagaaaagaaatagaggcctagtatttgagggaaaggttattgataaagcagcacattttgaagagattgtagtttaaagtatgggaatagatttaatatatggacagcaaatcaataaagaaaggcaaaatgaggttctactacaaaatcagtgsaactcctaaacataaggaaacggctgccctcatgtagtgaacacaagatccacattgtttgaaggacatcagcgtatgttctgtcctctccctttgaagagagtctaatttaacaggtgtgataagacatcagtaatggtgactaatgtatcactgagtgtcaagtgagtgatatgtgccttaggtcccagtttatattctggaaggtctaatagctttaccaaagccaaagaattctgtgataaaataagcttggcagttcctttactccaggacttggtaaagttaacacatctgattatatacaatattttccccaccaagtactggaaacttgtgttctgctggttaaggactatttctctgttgtggtaatccctagaagctagagtctcagagttcrtatggcatagacagttggcatagagatcttccaattrgtttcttccaacttttctcttgcatataacctagaagaatttttaaacaataatgtaaataatatacttccctcatatacttgtaaattsacatgcaaagcttttaagaattgtaagttgcaaaataggaataaaggatgtcatttctaataaattacaaatcttggcacttaaaaattaagtggtataattattcttctaaagatgtcatctagaatctacattcgttagtattgtgaggtcaatttttttaatattaaatcatgaacaagttcttctttaacatttagaaattttacgtcattcctttttcttggagtcatttcattctacatcctccattgaatttacttctaatatcatgtgtttgcttccttaacacttttatagctcaccctttcatgtttctctacatctaaaataaacatataaattaaaggaatactttacaaaagtctcattaccataaagttctgttgtaaaagcaaattcttctggattgagtcatcattacaatgatcagtaacacacagttgatctgaacaacatagatatactcagggcggataaataatagttaagcataataactgaaatttcatttgaaatgcatctctttgagaagaaaacgtcttttattttttctagttagttaattaatttttttttttttttttgagatggggtctcactctggcgcccaggctggagggcaggggcgtgatctcggctcactgcaacctctgcctcgtgggttcaagtgattctcttgcctcagcctcccgagtagctgggattacagacatgtgccactatgcctggctaatttttgtatttttactagaaacagggttttgccatgttggccaggctggtcttgaactcctgacctcaggtgatctgcccgcctcggcatcccaaagtgttgggattaaagacatgagctgctgcccccagcctttttctagttagtttatttacctatgagtgataatgatatattgctataacgggtatcagtagatcatattgataatccagtgtaaacctgacattaaggaaagatacagtggtacctcataaaatatttatgtattatgtgtaataagttgatagaaatgtaatattagatrccatttggggttattattgtactactcctgctcttttctagtaattaacagttggccactacaaacttgcacttggataaaatataaaatgtgttttttataattacaaaagggttcctagctttatgaaagattttaaatgattcaatatgtgaagtgatttctatgctctttttctatcatattaytccatgaaataaggcattcttgtacagggatgaactttggctgttctgttttgctgtaacagtatgatggatagcattatctctggtaggataattggggtcagattgtaaaactggagttgcgtttgcaccatgtgattctcagaagtcttgggatgtgcagatccaaggcagcctgtcgtgttcctgtgtgctgtcttagtctgactgctggtctccgcttggagtaagactcccrgaagctggaagggaatgaggctacagacctctctatttgagctttgaaagaagaaaaaatgtttccrtccagaaaagaaagctccgcaaggcagatggtacacagggaaggtggtgtctgtccttaacctcacactccctgggtcagggcagcctagggattttgcaagttattcacttccctcctccagggcaaaattatttcccttttatcttagccaacaccctctttggaggaagctcttcattagagttgtgtgggaaaaatgtcacttaatttctagggaataygattttatacaacagcagtctctcttctctactaatttagttttttttccgacgagtcttgtattggaaagtagcttaatagttaagaaactagtattaatttctttggttaggtctaggtattatrgcctctccatgagagctttaaaatgtatctaaccattcagttcctttacttcgttcagtcattcacaaacagttttgactccatcctagggtaagattaattccttccttctttgtgcctcttcctaccaggtacagactaacatcctagctcctgcaacactcacttgctccctgcgtgcctggtgtcctcctactggactctgaggttgtattcatctatgtatctactctagaaggtgggatacacagtgaattctgagagaggataaagaaagaactgccctaagcacttggacagtatttaatcctctctttcttttagtagctatgatatcttggggcagcttttgctcccccaaaatggaagtaacaataagccctgctcacagagttgtggttgaaattaaacatcagtaaaacactctctmtgcaggtgtgaaatgcttaattcatatgaagtgccactcttagtgttactggtggagcaaatgcacaaatgaatgagagaggatttattgattctgtgaggcttgtgaacacagctcctgctgtccatggaggattcatgttccagtagagctggatacatacaatgygtcgtgagagtacagaagggtggagaggattatagacagagccctagaaacctcaggtgtgaaaagtgtaattctttttaaggttaggcttgaggaagcttcctgggagaggtaaggcctgagcagtgatttgaggaaagggtattattcttgtctagatggtcagtatggtaaagtacagatagtgggcctgagaaatgtccagtggtttcttacttctatggtgttattgatatggaagaggggcaggggagtcctgggaggagaaggtgggcccctggcttgggcttcacccccaggcctgtgcctrtggacataggtgaggacaggcactcctgcttttgtacccaaatgttgcatttcccaagaccaccctggcctgccatgcccccttcctgtgcctataaaaactatgagaccctagcaggtagatacacaagctgctggatgttgagaggaacacattggcggaagaagatagaagyggctggatgttgaggggagcacactggcagaagagcacaccgacaaaagagcacaccgacagttgtcatcaaccagtggaatgacgcagaatttggccagggcagaggagagcccaggccactaagtggctcaactctaggggaaaagcatctcccttctggctcccccatctgctgagagctacttccactcaataaaacctcgtcctcattctccaagcccacaggtgatctgattcttctagtacaccaaggcaagaaccctgggatacagaaagccctctgtccttgcagtwaggcagggctctaatggagctgactaacacaagctgcctatggacaggggcttcagctgtaaacattcatgcctagacactgctgtggagtcagaaccccacagcctgtctgtctgtatgctcccctagaggtttgagctgtggggcgctgaagaagcaagccataccaccatcgcatgtcctaagagggggacaagggatctcttcttgtttcattttgaaggggaaggggcctggagcgggaagcagacccctccatgaaggacttttccccaagaggcagccaggagccattgaagtgatacataaagtggatggtctcatgttaatttgtgaagtcaccaacccctgtttgtgaagtgcgttgctaataaatacttttgctttatcttaagcttgggtgaaactgtgcaggatcttctgggaaagacatggaggggtctcttacaagacctcttgttgtgcctgcctgtatccagcttccatattagctatatccactcttagccagatgccatactcaatggcagtgggaagctttgtccttggagctgcctgccacaggtacatctacagaggtacrttagttccttggctgtgagctgcaaggagggcctggccggggattggtgagggcctgctctgctcagagggtcaattaaataactaggttcaagctgccctagctcattccagtcaacaggcacctccaactgaataaaaggtcattatcctagaatgtggcctctgcaagtcttcagacaataacccccaaatccattcactttacacaaacttgctttacttttattttttgtgtgattcttgaggagagaacacttagaatctgttggcaagacactgattttgactgtagaggtaattatgacagacaccctagcagctttattgctggaaactggccccttcgaggcacccccagtcagagtgtgttccctgaagagcctcgcctcttcagttcagaaatgtttccctggaaggttccaggcctcttatgttgccaggctgatgatcctctgggcacagccacctcccgtgggtgacttccccsgaaagcaccacggtggcctcgcctctctttggcttctctcatggcagctgggccctttccattgattcttcacagcacagagaccaaactgccatttgcagcctgcctttgccagaggcttagctgctgtggagggaagtgcggcatggaaatagagcagcaggtcaaggtctacacatgagctcttctgctggctcccacctgcctcccccagccctggtcagctgccccccaaggactgggagagttccacaagtcagcctgccttgtggagctactgattagagaaagaggaggaaattcttctgtaacctgaattcaaatcccacctcctcattccctcctaggaatggtctcagtgttagtggtggagagaaaacccatctggtagaactcactctcagccccaggacgttgttctggctctatggcttagcaaggcaatcccataatagtctaccatggacactctccatagtctgggttcctttgagttaaacaacaccttattgggtagtatgtgaacagtctcatccaaggtgggctgtgccatgcagggacagttgcttttcagtccctctccagttagaatctagagaaatatcactgtgaaacaaggaaaagacattcttgttgccraatgtgataatgtgttctagatgcctatgtaaagtagccctttttttaytcataagacaaatacttagaattatgatggaatatggtagtttcctcttatccacaagagatacgttccaagtcccctagtggatgcctgaaaccaccgaggcaagtaccgaatcctatatatactatgtttttttcctatgcrtatatacctatgatgatgtttaatttataaattgggcacagaaagagttgaacaacaacaataataaaatagaacaattataataatttgccagtatcactagtcttgtgctttggggtcattatgaagtaaaataagagttccttgaacacaaacactgcaataccccaacagttggcctcataactgagctggctactaagtgatttgtgggcagggcaggtggtatctacagcatggatctactggtcaaagggatggttcctatcctgggcaggacagagtaacatagaatgagatttcatcacactgcttagaacaatgcacagcttgaaacttaggaattgtttatttctgaaatttgccccatgatatttttggaccatatttaatcatgggtaactgacaccatggaaaacaaagcagcagatgagggaggactactatattgccacattataaatatagctgcttaagatgtaactccaaatatagttctacttccttccttcgtcaaatattattttacatttatatttattgacatcaccttgcccctgatgtgtacttttaaactatactttacctctctctgaygctcaatacttcttgtcccccatcaagtttcacaggaggtgtgtgtatatccagagctattgaagcaaactctaaactatctcatccacttcagaatgcctggcctgggctataatgtggaaatatacttacctccccttgtgatttatttgagtcaaaacaatttctagctataacatttccatttatagtgactgagaaaaaggggcaacattagtgatagaactcattcatttgcatttgacttgagagtttctgttctgattggtactttctatactatgaacttatggactgatatttacaatttcgccaatagatagagtcaccagagaatcttgcatataaaatgggcacagaatatttgtaggtttagtttcattgctcaggctctttgatgtgttctgtgggtgggagaggagtgttatctccagcttgttctgcattgtcattttttaaggcgagccaagcattctcaagttgcttttgctttcattacaacccttagaatgaattctctcaaggcctctgcggaccttgaactaaacccacctaaataaatggccaaattctactctgccttcttagtttttgtccctgtcacctgaaatgcttagcctctcatggcttccctggtgtcacacactcatgagcctattcttggccgtcctctcttgttttcacactgccttttgcacttcctttcctgccgcagctgtgtgctgtgggccaggcttgctctccggggaacatttgttgtatagtctccgtgacatcctgtgcagtgtaggatgttcagcagcattcctggcctctgcccactagatgtacacccctcttggcactcagaaatgtgtctagacattgccacctgtcctctgggagacaagagtctcccctggttgagaaccactgtcctaatgtttctcctatttgtagtatccgttctactcttgttgccctattcaggatttaatattccatagccccaggatgcttacaaagcttccccatgcagaaactctcttccctccrctccctgcagagacacagaatagagcaagctgacactgtggtgtttccctgggtgaaaggttatttggagacttcacaagtacagactaagaaaacagaacgatggtattgtggggacatgggaaaggggaatgcctgcatttcacacgtttagttccacaaacagaaggatgcccatggacaggggtgcccagcaggcagatataaatttagccttggtgtgatcattaagtgtcaacttgattggattgaaggatgcaaagtattgttcctgggtgtgtctgtgagggtgctgccaaaggagattaacatttgagtcagtggactgggaaaggcagacccaccctcagtctgggtgggcaccatctaatcagctgccagcgctgcttgaataaagcaggcaaaagaagttggaaggagcagacttgctgagtcttccagtcttcatctttctcccgtgctggaagcttcctgtcctcgaacatcgaactccaagttctttggcttttgcactcttgaacttaaaycagtgatttgccaggggcccttgggtcggcttccctgcttttgaggttttgggacttggactggcttccttgctcctcagcttgcagatggcctattgtgggacttcaccttgtgatcgtgtgagtcagtacttcttaataaactccccttcatctgtacatctatcctactagttctgtccctctagagaaccctgactaatatacttggacaaaaggggccccaagccccaacctgctcactggatggatctgtctttattggccccttgcactggctgtacaagagccaaaggagtgagtgcccccttgtccttccctctctaacgtgcatatcttccatccccactcctaggccacyttcactgtcatctcacagacaaatccctggtcttcatccgggcctcattgtggtctccctttctagtaccccgaaggtcagagcaccattgttcttgcctgagcattacctggactctgttatgagttagtcccactttcctgtgctgcatttgggacatcactgttcagagaaagcctctagaggaagtaggatctcccactgttctgcgggtgacatcagtcaggagagtgcgcaccagtcatggtrgggacacatgaaacaactccgtggggtctcaggtgcaccaggcagcccaagagcaggtggacgtggtgatgtggttggattttcctrtgtgtgtgtgtgtgtgttttttcctcagtagcattttctttatttgtaagaagagatcttttagcattttataaaattacttttattgctcgttttttccccttgtaacttgaagggtttccttctctcttctttttctatttacttatttttcctattagtaactactagactatttctatcagcaaggtacatttttaatatagttgtattttctattttcctgtccagttactaagattaaaagctttgctttgcccttaataatggaacaaaacaccatccaaactgtggttaaaacatggttttcttctgggatgtggtaaaacgagaaagccctcatcatcccagcatgctttgcctaagctgacttacaacagaattgtgccctggatgtcagtgcatgaactctggccccagggaggctctctgggcaggcagcgctactcaacatggtgtcagctgcttgctggggctcccaggatgcatggaacctctattgtattttccagacttaagcttctcttcatggatttacaccaaatgcttaaacatgtctgtctgtttttaagatttggagatattggttttctcttagttcaactagcatcaaggcttgctgcgtttcatgtgcagggccatcagtgctactgggaccagcatttctgtccagcaattaaaggaggaaattccctaggaagaagtggycgggagccaggaggctgaactaaatagcattccaaattagttgcaattgtccgaaagaggaaattgctaaggccctggttcccaaactgtgggccaaggctccctggagtactggaacaactacaccatgttgtaagtgttcacgttttcaagggaaacacagctaggtaccatgcagaggactactatgagattgcttagacttcgctatttaataaatggaatggataggttgattttgcataggagtaccatgaaaaaaatcactgaaaggtaagagcactatgaactgagaaagtttggcaacttctgctctaacggtataatgaaggtttttgaaaagctgaggatatagccaggtgtttgtgagggatggaggataggtatataaaaggatgtgagggaggagaagacacaggtttggaaggtggataattgggccaaaatgactcttaatttacaaggartagaggttggctgatccctgtgrtgccatgggctggcagctcattatgttatccctgacatacaagccccgaggctcccatcccctagaagtaagcaccaccctaagcccctcagaccaagcgtttgcctctgtttttaccttggcatttattcattcatgaaatatattttcagtatcacctgcatgctaggagctagggagatggtagtaagcagaacagatggaaattcctgacgtcttgaagcttatgtttttctagaataatatcgaatgggacatagttggtgtttcctgtgtgcctggcattgttctagaagctttccatatattaactcatttaatcctcaccatatttattccataaggatagataggattgccatttacatgtgtctggtgttaacagtggctctcagagcaccttgttgcttgtcctcattggatggcatccccgtcaacctgatattggtcgagagctcaggtacaatagcagcgttcagaacctctctgtgtcactgagtgaggctctgttaggtggtgtgagcctgctctgtgttacctcgcagaaagctacacgctgcatattgactaagaaaacttctgtcctagcacatcttcatctccatatgtgagatttatatttcataaaacttatatatgatgaagtatttaaattcaacagaagctacattcacaaaatggtaagccttgctttgggaatrtcccctattaacatgcctttctagggcttgctcttcccgtacagcaagctgagtagtactggcactgccactcaaacaagtttctgatcataatgaagaatggctgacttattagttgtgctatcctgggatgtcaagcattgttaaatttgaaaatgtgaactggacatagaaaartggtttatttcatttatcgtgtagctcagttgtttccttgaaaagcagaaagaaattaaagatgttgaatatttcatggttataacaaatgaaactcccatgaaataaaagagttcacaytgttactttattttccaataatgaaagtaccatttgttcatcatggaaaataccgaaatttatcaaacaaaataaaagtaactcccatcatattatccaaagaaaacaactttttgttgtgtttccttttaccctttttctgggcatagataagcttccatttttttaaattaaaaacttactgtgggctagatgcagcggctcatgcctgtaatcccagcactttgggaggcccagacaggcagattggttgaggccaggagttagaggctagcctggacaacatggttatatcccgtctctacagaaattaaaaaaawaaataaataagccagctgtggtgatattcacctataatcccaggtacttgggaggctgaggtgggaggattgcttgggtccaggaggtcgaggctgcagtgagctgtgatcatgccattgtaccccagcctgggtgacagcaaggccctgtcaaaaacaaaaacaaaaacaaaacatcttattgtgtatggactgtgttcagggcactaaggtttgctttggagcaaagtaaaataaacatatgttccctgttaatacaggtataaagaaaggcaaattactgtgtccctcatcttaaaaacaaacacagtactttccttcaatcatacatcactctcgactctcctgtctgccccttatttttcttctcatagctgtcgaatcgatttcattaaagatagctgaagccttgtagcccttctggattttctattaaaattcacctaatggtagaggtaaaataaaatgtgcatcttcaccccttcactgtagcactccccacagctgtactctggtttacaagactctcccattctcttgagagcaaattacttgaggttaaggacttagggcttatctgtctttttacctttggaaaatagtgaatgtttaataatgtttgcatctttctgtgagagccttcgctccagcacatcaatgatcttgggcaccaagcaccaagagtcacctagatttgtacatcagaagccaaaatggaatcaaaccatacactgaatgttcagggaatctgtcttatctttatcaaggctactcgtcatggttgaactggtagtgttctgatttcccatgtgagcacgtgtgcccatgtcaatacatttatatatccatagtggacatgtggtccatgattgtcaggaggcatggttttctcacaactgtgggcgtgattaattacttgctagaaagtccacccacatattccacttgtattgttacagggctatttaccagacacttcaggggctttagagaggcactggataatgcccatgaccacaggcggttcatcatctggagcagtgtgagagtggctgacatgatgatctgaatcagcaatggctgataatccgaatcatttgggaagtttaaaaaaaattgtgcttgtataggtgtataaatatgtgcaagtgtgtttaatgtttatatgtggtcctatctcataattagtaaagtcaaatgaggcaggattgtagaattacaaagctttcaggatggttcagatgagtaactagttttgggaactaatgagttagaattcttttttttttctttttttatttttattttttaattttattattattatactttaagttttagggtacatgtgcacaatgtgcaggtttgttacatatgtatacatgtgccatgttggtgtgctgcacccattaactcgtcatttaacattaggtatgtctcctaatgctatccctccccgcttccccccaccccacaacagtccccagagtgtgatgttccccagaattcttaatgccaaaaaacgtttgtcagagggcaaactgaaacctggcagtgacaagagggccacgtctcatgctccctcatggatgccacgttgccgtatgtcctgccactgctgaacccatacagggaggcgcttcatttatgagtgaggtgaaactgcgttgagagtggcggaagtgtgctgtgcagtacatctgtgtgaaaggattccgtgtttttctaggctgagatgaaaagtaggaaagaactacagtgaaagagattagtcaaatgcagaagcagtgtactagaagctgtctaaggaaagctggttttagaactagccctactggtcctacagctgatatagtacctgtgctgcatatatttagtgttcttgtaaaggtaaatgagggaataagtatgagcaaaaaaattttaaagataaaaacgtttacacaaatgaatgatggcattatataagtattgcaataaagaactccttttcttctctctctcttttttgttttttggtctggcctctagttagagttccaatagtttacattcagtgctgttaattcccacaatttcaaagatctgcatttcctgtaaatacctaattgtattttgaaattgaaatgatttttggataatctgccatttggactatctgcatcatttttatcttaaatgatggaaacctgaatatagatgatgataacagtgatatawttgtgacatatttatatggttcaaagcacttctgttgagaggaataaacaaaacaacatacataaatgttagagacatttttgtgcacaatattttcaggaaacttgtatctatgtacataataattacatatttgctttccttagaattcaagatgacactcttcacattcaagataataatagatgcacatttgatatccaggaaaatactgtyacattctatcctagctaatcaacgtatttgtatttcagagatgggtggccaaaactagattactaacttaaagtgacatttttacatgttgggtttgtagacaggtgagatatcctttcaaaaattatatatgtaaacaaacaaaacataagtttgtgttatattattgaaatattaaaagcatggctgtgagattgctcttaaagatatctcaagtcaaggggacctataaatctcacaatattataaaggatctgcaagaccatttgcaaggcttcttagtatatgtgaggcttatgaaatggaattctttcatttggccatataaaaactttcatgtggtacttccaaaacatttctattttagcagaaatgagattgctctttcttagaaaaggatttcctaaccagagtcctcctgtgttgggaattggaatctccctccctctctccctccctcctttgtttacttatgtatctatttactttccccccttttttgtgtgtgtcagacatttcaatgtttgagtattgattatcctcatttttttaatgttcaagtggtaattacattatttaacaaatattgtcctatagtttttggaaaggatgttctaattaacttagagccaaatggcatacctcctttctcacaactcttatgagttaaaatctcgttaacctaattcaatatacttcattgttttggtaaatttaatataacagaatgtagtaatgtagtatatttattctccatatccattccctttctttcacttcccaaacccacatttcctgtgggcccttcccctcttactgggcatgtgtttcaagtggagccccatctctggctggaggagtgggacactcctcagggctggccaatcagagcctcagtttcccccagccatgtgactggttcagaggtaagaatgtgacttagataccgcaagtccatgtaattccatctccctgtgtacacatttacagacatgcaccacttaacaagggggatatgttctgagaaatgcattgttagtcaattcctttgtgcaaacaccacaaaatgtacttgcacaaacctaaatggtatagcctactacacacctaggccatttggtatagcctattgctccaaccaccatcatatatatggtctgtcacatgcagtctgctgttgacaggaaagtcgttaggcagtacatgacttacctatgtagagattgagttcatccaatcagagtgaataatgagacatatgtcatagttgctaggaggagatatgttctatttcccaagggccttgaaataggtcgcataaagcccactgaagctgccaatcatcctgtctaaagagacagcagccagtggagggcaaagctgaaggatagagaggtaagtctgtgtccttcctccaacacacacccgaaagcatttttacctctgcacttgttatttacctggtccaatatatttcccttttggattaacgtagtttgatttttctgtagtcactgaacagaagagactctgcattttggttgtttttggtgtaggatatggagtttgtcttgaattgcttatctcactacttaaaaatgttgagggcagtgagaagatttgtaaaagaaggggttaaatatattttgtgatgttccagaattgtgttcaggcagagttatggtataggatggagatgatttaaggtttttgaaagttttgggcaatcacagtctttactgcacttattttttgaggaaaatatacactatttttattttcaataagggctagattgcagttcttaactaggagcaatggtcttaaatattgccaaagattatttatattttactttgaaataaatctcttggggagcaactctgcctttcttatcatgtcagtcttacatcaataaaaaatatatttattttctgaacattacagataggctcactgactggtagggaaagccttcctgagttatttttttaatgcagacatagaacatttatcaccttttattctagcaaatcttctgaagaaaatcatttttgttgttcataaccattttattttttccaaatctcttttaattttttaaaaattgttatggtacatagtaggtatgtatatttaaggagtgcatgaggtgttttgacagagatgaagtgcataacaaccacatcatgaaaaggggtatatatcccctcaagcatttgtcctttgtattacaaaccaattatactcttttagttatctttaaatgtacaattaagttactattgactgtagtcacactattgtgctatcaaatactaggtcttattcactctgtttttttggtatccattaaccatctccaccttcatctccacttccctcctaaccccgcattacccttcccagcctctagtaactatcattctaccctctgtctccatgagttcaattgttttgatttttagattccacaaataagtgagaacatgtaaggtttttctttctgtgcctgacttatttcacttagcataatgtcctccagttccatccatgttgttgcaggtgacaggatctcattctttttatggctgaatagtactccattgtgtataagtaccacgttttccttatccatccttctgttgatggacacttatgttgcttccaaattttggctgttgtcaggagtgctgcaacaaacatgggagtgcagctatctcttccatatgctgatttctttgcttttggatatatatgtgcagtgggattgctggatcctatggtagctgtaattttagtttttcgaggaaccttcaaactgttctccgaagtgctagtactaatttacatttccaccaactgtatatgaaggttcccttttctccatatccttgccagcatttgttattgcctgtcttttggatataagccgttttaactgggrcgagatgatatctcattgtagttttgatttgcatatctctgatgaccagtgatattgaacaccttttcatatgcctgtttgccacttgtatgtcttcttttgagacgtgtctattaaaatattttgccattttacttattaatatttttcctatagagttgtttgcrcttcttatatattctggttattagccccttgtgagatgggtagtttgcaaatatttccgattctgcaggttgtctcttcatatggttgattatttcctttgctgtgcagaagctttttaacttgatgtagtcccatttgtccattttggcttttggttgctggtacttgtgaggtattactccagaaatatttgcccagaccaatgtcctggcgagctcttctgatgttttattgtagtagttctattgtttgcagtcttagattgaagtctttaatccattttgatttgatttttgtatatggtgagagttaggggtctagttacattcttctacatatgaatatccacttttcccaacaccatttattgaagagattgtcttttacccattatatgttcttggcacctttgtcaaaaatgagtatactgtaggtctgtggatttgtttctgggttctctattctgttccattcatctctgtgtctttttttatgccagtaccatgttcttttggttactatagctctgtagtataatttgaagtcaggtaatgtgcttcctccagttttgttctttttgcttaggatagctttgactattctgggtcttttggggttccatatacattttaggatttttttttgttkctgtgaacaatgtcattggtgttttgataaggtttgcattgaatctgtagattacttgggtagtgtggacattttaacaatattgattcttctaatccatgaacatggaatattttttaattttttggtgtcctcttcaatttcttcaacagggttttatagttttcattgtagagatctttcactttttggttaggttaattcctaggtatttaatttcatttttggctattgtaaatggggttacttttttatttcttttacagattattcactcttggtgtataggaatgcatattgatttttggccaggtgcagtggcccatgcctgtaatcccagcactttgtgaggccaacgtgggcagatcacctgaggtcaggagtttgagaccagcatggccaatatggtgaaactctgtctctactaaaaatacaaaaattagctgggcatggtggcaggtgcctataatcccagctactctggaggctgaggtaggagaatcacttgaacccaggaggtggaggttacagtgagccgagatctcaccatggcactccagcctggtccacaagagcragactctgtctcagaaagaaaaacaacaacaacaacaacaacaacaaaagcaatgcatattgatttttgtaggttgattttgtgtcctgcaactttactgaatttatgagttctaataggttttggatagcatctttaggtttttctaaatatatctatcatctgcagaaggataatttgacttcttcctttccaatttggatgtgcttaatttcagttctcttgcctgattgttctagctaggacttccagtactatcatcaataacagtggggaaagagggagttcttgtcatgttctagatctttaatatgatactagctgtgggtctgttatatattgcttttactatgttaaggtatgttccttctgtactcagatttttctatgatttttatcatgaagggctgttaattttaccaaatactttttagcatcaattgaaatgatcgtatggtttttgtctttcattttgttgatatgatgtatcacatcgattttcatatgctgaaccatccttgcatcccatggataaagcccacttggtcatgatgaatgatctttttaatgtattgttgaattcagtttgctagtattttgttgaggattgttgcttcaatattcatcagaaatattggcctgtattttatatatacatatgtatatataaatataatatatgtatatgtaaatataagtatgtatatataaaatacaggccaatatacaagtatacacacacacacacacatacacacacacacacacacacacacacacacacacacacacacacttccagactcattctttcaggtcagtatgaccctgttaccaaaaccagttcaaagatgtctggttttgatatcacagtcatactgacctgaaagaatgagtttggaagtactccatcctcctctgttttttagagtagtttgagtaggattggtattagttcatatttaaatgttcgttagaattcagcagtgaagccatcatcaggtcctggcattttctttactataaggctttttattacwacttcaatcccattactcgttattggtctgttcaagttttgaatttcttcgtggttcaatcttggtagcttttatgtgtttagggatttgttcgtttcttctagattttccaatttattggcatatagttgctcataatagccactaatggttttttgaatttctgtagtatcagttgtaatgtctcctttttcatgtttgatgttatttatttggatctttttttttttttttttttagtctggctaaatgtttgtctgtttaacttttcaaaaaaacaactttttggttcagtgatctttgatattctttatttcagtgtcatttatttcttctctgatttttgttatttattctactaaacttgggtttggtttgttcttgcttttaaattattcrtttgacatttttctttttttttttttttgttgtaggcacttatagctctaaactttcctcttaatagtgcttttgctgtatcccataggttttaaatgttgtgttttcattgtcatttgtttcaataaattttttaatttccttcttaatttcttcattgacccactggtcattcagaaacattttgtttaatttccatgtatttgtatagcttccaaaattcctcttgttattgatttcttttttatcccattgtggtcagggaagatgcttggtattatttatatttgtttgaatgttttaggacttttgtgacctaacatatggtctctccttgagaatgatccatgtgctgaggaaaagaatgtgtattctgcagcctttggatgaaatgttctgtaaatatctaccaggttcatttggtctatggtgcagaataagttcaatgtttctttgttgattttctgtcaasaaatactgaaagtgggatgttgatatctccagctattcttgtattggggtctctatctctctttagcgctaataatattttctttatatatctgggtgcttcaatgttgggcccatatatatttacaatcattatagcctcttgctaaattgacccgtttatcattatatagtgaccttctttgtctcttaaagttttttttgttttgttttgttttgttttgttttgttttttatcttgaaagctattgkctccatagagctcctcctgctctctttcagtttctatgtgcctggaatatctttttccatccctttatttttagtttacctgtgtctttatgcctgaagtatgtttcttgtaggcaacagattattgagtcttgttatttaaattaatgtcgtcactctttgtcttttgattggagagtttagtcctttacattcaatgttattgataagtaaggacttactcctgccattttgttatttgttttctggttgttttgtgatcttctcttatttctttccttcctgtctttcttttagtgaagttgattttctgtggtgataccatttagtgtctggcttttttgtgtgtgtgtaaacattgtatgttttttgatttaaagttgccatcagggttgcaaatactattgtataactcattattttaagctgataacaacactgcataaacaaacaaaccagcaaaaagaaaacgaataatgctctrtgcctctttaatattttgtagtttctgtttatatcttcttgcactatgtcttgaaaagttgttatagtttttttattggttcattgttaattctttctaattaacataagttcattgtttattctttctactaaatataagagtagtttacacaccacagttatagtgttatattctgtgattttctgtgtacttactattacaagtgagcttcagatgatatattgctcattaacatccttttctttctaatcgaggtactccctttaacatttcttgtaggacaggtctgctgttgatgaaatccctcaatttttgtttgtctatgayagtctttattccccttcatgtttgaagaatatttttttccagacatattcttctaggataaaagttttttttccttcagcacttcaaatatgtcatgctacttgctgctggcctgtggggtttccactgaaaagtttgctgccagatgtattggaactccattgtatgttgtttgtttcttttttcttgctgcttttaggatcctttatcctcgacctttgggagtttgattattaaatgccttgaggtagtctttgggttaaatctgctttttgttctatagccttcttgttcttggatagtgatatctttctctaagtttgagaagttctctgttattttccctttgaataaactttctaccccggtctctttctctacctcttctttaaaggccagcaactcctttttaagtccaataactcttagatttgcctttttgaggctattttctagttcctataggtgtgcttcattttttaaaattcctttttcttttgtttcctctgactgtgtattttcaaatagctggtcttcaaactcattggttgtttcttctgcctgacctattctactatcaaatgactcatrcattcttcagtatgctaattgmgtttttcagctctagaaatactgattgatactttttaattatttcagtctttttgttaaatttgtctgatagaattctgaattccttctctgtgttatctttaatttctttgagtttcttcaaactcaaaacacattttttttttgagtcagagtctcactctgttgcccatgctggagtgcagtggtgtgatctcagctcactgcagcctccacctccgaggttcaagtgattctcttgcctcagcctcctgagtacctgggactacaggcgcatgccaccacacctggctaatttttgtatttttagtagagacagggtttcaccatttaggtgaactcctgacctcaggtgatccaccctcctcagcctcccaaagtgctaggattacaggcatgagccactgcacctggccaacacagctatttttaattctctgaaaggtcacatatttcagaattggtccctggtgacttatttagttcatttggtgaggtcatattttcctggatggtcttgatacttgtagacgctcatctgtatccgggcatggaagagttaggtttttactgtagtcttctcagtctgggcttgtttgtacactggcaaggttttccagatattctaaaggacttgggtgttatggtctaagctgtatctgcattagggggcacrctgatcccagtaactctgtggttcctgaagagaagactcatggagtgtattagtctcttctcaggctgctgtgaagaactgcccgagactgggtaatttataaagaggtttcattgactcacaggtacacatggctggggaggcctcaggaaacttacagttatggtggaaggggaagcaaacacatccttcttcacatggcagcaggagagagaagtgctgagcaaagggggaaaagtcctttatgaaaccatcagattttgggagaactcactcactatcatgagaaaagcaggatggggtaactgtcctgttttaattacctccccccaggaccctcccacgacatgtggggattatgggaactacgattcaagatgagatttgggtgaggacacagccaaatgatatcatagaggtaccactttagtggtcttggacaagatctggaagaattctctggattaccaggtagagagactcttgttctcttcccttaatttatctcccaaaaaacagagtctctgtctttgttctaagccacctggagctgagggtggagacacaagcacccctgtgcccactatctctagaattgctctgggtcaaacctgaagcctgtacagcactgggtctttcccagggcctgttgtaagaactccctggctatcacctaatttcactcaaggccttggggctctacagtcagcagatggcaaagccagtcaggcctgyctccttccctgcagggtggagagctcccctaggcccaggtagggccaaaggtgctgtcccaggtgcatggaatttgagtcaaaaaccttagaagtttacctggtgttctgttgtcctgtggctgagctggcactcaaaccacaagttgtggtcattcccactcttccctcccctttccaaaggcagaggtgcctcattccatcgccacagccaccatgggcccacagggagtactgccagactaccaccagagctcccttctggcccaaagggctcctaagtcagcctgtggtgaatgctgccttgactcttggatagcatttctggactcacccttcatagcagtatgctcccctctggcacaggacatgtccagaaatgccatccaagagtcaagtcctggaaccagggacccccaaatgcccacttggtgctctaccccactgtgcccgaggtggtacctagggtgcaagacaaagccctcttcattttttccctctgcttttctcaggtggaaggagtcttgcctcgtatagccaccacagctgggaatgtgctgagtctcaccagaagccagcaagtctcagaggctcaccaaggcccttgacatagcacctcagcatccctgctggctattcagaamccttggactctcagtcagcaggtgatgaattctgccaggactaggtccttcacttcaaggcagtaggttcccttctggcccagggtgtgtctagcaatgtcatctgggagctagaagctggaaagggggcctcatgattctgagcattgccctatcctgctgtggctgagctagtattatagatgtaagataaagtcctccccagacttcccccacctctgcccaagcagagrgatggggtctctgttggagccacaagctgtggagcttgggcttagggtaggaatgatgccaatacttctttagctgcccttggggatgtctcagtgggttacatgccaccaagtccactggctctgggcccagttcagcactaggcctcacctacgagttccagtccttgtggcctagactgcctttcaagtttgggttccagagtactttaacttgcttgagaggcatgtgggagttcaagttcggactgttgggactggtgattcccctcttyctagggctggtttaaatgctcccttcatgggtgggcatcagttgagtttgctctggttttgttttctgctgtaacaaggcagcactgagtttagtgcctcatggctgctgtgctcccctctccccagcacacagaaatactctctgcaccatgttgctgatatgtgtgtatggggtggggtggggggtggggttgagttggggggggagggcagggtgatgggggaggggtggtgtccttggcaattcaagactgtttttcccacctcttcagtgcctctttcagagataagttaaaaccagttactgtgtgtgctcacctgatttttggttcgtaagaaggtgcttttttagtgtagataggtgttaattggtgtccttgcaggaaagaccatccttctctgccccctgtctgagttttaaattttaytctagatattttttcaagaaaaaaggtatatgtgtgattagttgagaactaaattacttattggaggacacatatagacataaggtgattaggcaaattcttcctctgaaggtatcgtattttgaagcacttgtttgctatcatacctgggtgctatgagaatcacttgatagatctgcctccaaaaactgacagtgtaactttcctgatctggatttcttagcattctggcagggtctgtgctataaaagccattggcagtgtgtctgttattttcaggcaagattcaacttcctgttcagactccagaacttgctgtagcaggaaattgacaaatgatcagaaatgtgccktcagtgactagcctctgtgatgttgtgttttgttcaaaggatgaattggctttatgtagaataaaagccattggaaacatatggtacaacagttggctgtagaatttgttttgttataacttcagaagctgctactattttgctttgacatgcccttgaaaatccaagatgctttggtcaatgkgtttgttatattaaaactaacataaattttagtggaagtttggtagtgtaagacaggcttcacttattttttgtgtgtgttccaaattgacctgagatgraaggacaagatgtaatttgtaaagtacyacaatagaagtaactggagaagctatgtgcaaaaatcaggctcattattttatagtcacatagcatcattttaagttccttgaactgaaaagcagatctcatacaaggaatttctagccatgttgagcccatggtgaattgtaagtgatcataatatagccaaaaatgtgtaattcagaaaagatacaggggctgttctggagctttgcttttgcatrttgcttccttataggaatagaatagttgtatttctaacttcaggtcagacaggtttggacatttttggctcaaatcatttcttttttttttttttttttttttttttttgagacggagtctcgctctgtcacccaggctagagtgcagtggcctgatctcagcttactgcaagctccgcctcctgggttcacgccattctcctgcctcagcctgctgagtagctgggactacaggcacctgccaccacgccaggctagtttttttgtatatttttagtagagacgggttttcaccatgtttgccaggatggtcttgatctcctgacttcgtgatccacccgcctcagcctcccaaagtgctgggattacaggcgtgagccaccacgcctggcccaaatcatttcttaatgtgaaaaatgattagcacttgattattcagagagtatgtacaggttatctggcaccacggttgcttaaatactctgacattagcataatcgtgaaactagtcagttaactagaaaatgaaatgccttacactactgaagctatgagtggccccttgtaggtgatttgagcattctgtacaatgccattacgatctgtaggttcagaaattttataggatgaaacttggcttggaagtggggtgtgtaaaagtgctagaacaaaacaacctacttatattttgaaatttttattcttcatagatataaatatgacaatttatgttattatttttttttctttgctgctctctttagcttttcttgktgactttggctttttcagaggcttacttagtatgaaggagtgtgactgtaggtccagttccttgagcaggtgagggcacctggagctgaagaagttgatgacttagatccatgttcccagaaacaccaagcatgtctgcttcctttttcttttagacccactttcacataaagataggaaaaatatgaggctaaatgaacctctggtttataaggttagtttgtaagtaataatgaagggacacgagggtgatatgaacaattatgtgagaacaataggtataagccagggctgttctgggcaaaatggttgtcaccccgataataactaacatgctttgatcattttttcattgcctggcattatgctaagcatctatgggcgttaactcaagccacccaactaaccaatgaagtgtaggtactattttcttatccttatgatggttaatttgtgtccacttggccaggtagtggtgcctagttgtttggtcaaacagaagtccagacgttgccgtgaagatatttttagatgagattaaccatttaaatcagtgggcttgagttgagattaacatttagataagtagactttgagtaaagcaaattacccaccataatatgggtgagcctcattcaatcaattgaaagcttttagaaaagagacagagttttcctaaggaagaaggaattttcaagattgtaacatagaaaccctgcctgagtttccagcctgcttaatttggacttgccagccccamcacttacatgagacagtttcttaaaatctcaatcaatctctctctctggctttctgtacatatgtttatgtgtgtgtgtgtgtatatatatatgtatatatatatakagagagagagagagagaaacatatatatatatatgtttctcgtgtgtatatatatatatgtttctcatatgtgtgtgtgtgtgtgtgtgtatatatatatatatatakakagagagagagagagagagagagagagagattatatgagccaggttcctctggagattcatgtagtgcctttatgtttctcatatatctactattgattctgttcctctggagaaacctggcttatacaatctccattttacagataaaagcacagagaggtcagttaactcagctaaagtcacacagcttataactggcaaacatgagatttgcaactagatttttggactccagggctcacatgttttactgttaagctttattgcctcttaaaaacagaaacaaaacaacatcaagagaaagcttttatgatttttcattcaactggccctgtctctcctgagagtctccattgttaagcagctggctgttttctttaacttaggaccctgaagcaaagttttgtgattattttgtatcactattacaggggaccacaggcatttctggtcaagattctgcattctttaattgcccttatagatagtttattcagggcatgtgaaggaatatttctgtgcagttttagaatttctgataggtgttttaggggaagacctactcccagactactaatatattatcattgtcatcatgagttagtgctaattcagatgtgatactctaggctagcrtttcccaaacctgcttgaatgggctgttgcatgaacaacattgcaactttcattttcatgttacactggaatatggaatttttgtataacattagtattttgaggcactatataacatatgtatttgtcatctattgctgcatggctcaaaacaacaatcattgttatgcctctcagtttctgttgtctgacattcagataggacacaatgggaatggattatctctgttccatcatgtgtggggcttcagctagaggtctcaagtaccagggcctggaatcatctgaaggcttgttcactcacaagtctagaaattaatgttgactgtcaggtgtggaccacctggggctgctgctgggataacatacatatggcctcttcatgtggtctgggattcctsacaacatgatgacttgattccaatggcaagcaccctgagggggcaggtggtcactgctgcactgccgttcatgacccagccttggatatcatgcagcagcacttagcccaaagttgtaaagaccccaccaagttcatgtgaagggaatgtagaccccaccactcagtagaggagtgtctgtaactttttaagaagagcatgtgtaacaggatataagtgtggccatgattgcgaaatacaatgtcagtatcctcttaccataagaattcacatcatatgcttcctacatgtaaaatacactcacttcttccccttaagatctataaatcttatcctcattgggatgtcagatcaaagtctaggatctcagcccttaaatcaggttcaaatatggaagagatattttcattgtggatttgcacagcttctcaaatatagatcttagtctgaagacctgtgaactaaagagacaagttatctccctcccaccccctcaacatgcaatggtaggacgggcagaggagaactttcatgtagagcctcctgttcaggaagggtggaaacagaaggcatgcacgagtcactggttcatagaaactctgaaaaaccacctggaatgtgatgtaattacttgacaaggtctcagtcctactgcctaggaatgattctccataattcttgacttctgtctgagtcactcctcctcttccctaagaagtggccagtttcattgggtagctttccaagtctgatttctgcctgtagtacttttattttagcctcttggtagtccaaaggtctattttcattgtaagtgtctctgtccattttggtctgaactggcagtgtttctaatggcagtgtcagactaattctcttaaaaatcctatggatctcctgtgaatcttactgaggttcattttgttagacaaaattcacattcatcaatctctttgatgaatgagattctttgatgaatgagaatcccttgagattctgctgagggattaccctgttaaggtttttatagacagtactgttaatagacaggatctataaggtatgtccgtaagattcttagccttttatctgaatgaacagttctctgaggcactgacttaacacgtttctgagattttattaagggcttttatagtgtaccctcagcttttaagagttgttttctgggaggaattcatgatctatcataggtaagtattaaactagaaaaagtatgcattccaaaattactttttttctgaacaagaatgagaatatggctttaattgtgttcaaaattgttgcatttcatgagcttgcatttgctaagatggattaatttatgatatctttgagaagttcatgaaaacctgacaaatgtccacgtcaacttatgctttatataagttagcttgtgtgttcagtcactttttttgtgaagcagtgtaaccatactagtaataatttatgtgaaaagcatctcactctttcatgaccgcaaagttcctgcaggattttcttatgatcaaatattttacattgtaaaaatttttcgatacactgaaacctaaatatcctataggacaaatgaaacagtctgattagaaatgtttttctgttgctgttgatttctccttttcacrtttatggacaacattccctgttattctaagtttgacagtgtctttttatttttgcccttcgtatttcaatggaggaaatttagaaataagacttccttatctttctttccagagtctctgtggtggtcctccgtgtccatacataatagtgcagttttgcaggtgggattccctgggaagccaactccaaggtgcagattagcatacaggatgactcttaagggttgctcttggggtcagtgtctagtggagggaagggaaggaagcagccttacttccccctctgcccaatcctgtaatacaggctcagcaaaggcctctgctgaccctatttgaaacagctgaagcttggctgttctttcagagttgtcctgagtcagggcaaggagattgagtctttagaccccagtgttcatcagtcatttgatgcggattacctcgggcaaaaacactctcttcattcaaggcaattctagaggatgacagctgatggccagtagtgtttgctgcagctgggaccataagctttttagtcttaaagcagaggagggatgtacatcagagtgtccactcacacgcctgaaatagaatgaggtggaagaaggcaagacaaattatttgtatgtgatggtgctagatcccccattacatacagcagtggtgtttttggttgatttstttttgtttctaaataaaggaaaatgtttatattactgtacagtgaataaaacaatgaattctgttccaaaagaatcataggtaacttcaaactcttttgactgttttcctgtatttgctataacgagtaagaactgtttttctctaggatgttagggtgttgctgtggcractggtgtcctatgctgtacttgttattgcctcatccttcatctgggcctggtggccctctcccgtgcttctgtagccgggaattatgcacagcatggttgttatccttacaggattgttattggtttgtgttcctgggttccccaatgaattggagggctaggccatgttttattaatttcacctgatttgcctagggaagcgcacagccctggagggcactcactaaatgcttagtgaactgactcttgcctgctttcctgtcctaaggcactgttttgcctacctgcttgtcttcggagctctgctcagctattctgagtagttactgctggctactaattctgatacctaatcagaccagggtttctgatgtctcttcctcttcagtgttcttgcccaccttcttattctactgtattttatcttatctctgagacttcttggatgatctaccctttatttgatttctctccctatttcagactatcactgtattttgaaggatatagcaacttatattcaaggaagtagtttaaactaggaatctttgcaaggtcccttagaatttcatctgcagttagttatctagtagttgcctcttcactgacaaagagcagagtgtagtgttggatttagaggggtattctagtctagctgcttggttgtagtttctgaaatacaaatctggcttttttttttttttgacagagtatcactttgacacccagcctggagtgctgtggtgcagtcacagcacactgcagcctcagccacccaagctcaatcgattctcccacctcagcctcctgcgtagccgtgactacaggcatgtgccaccacacctggctaatttttgtatttttggtagagacaggttttaaccatgttgcccaggctggtctcaaactcctgggcttaagcaatccacccgcctcagcctcctaaagtattgggattacaggtgtgagcccccatgcctgtccacaaatctagcttaatcataaatggggatttattggcttgtgtagttgggagtggaggaatagagtttggtttcaggcatagctggatccagcagctcaatgacaacygggctctgtctccctttccagagctcagctcacttctcactgtgctgtggcttcattctgaggcagagtttctcctataacataagagatgacaggctcaagcttatccccctacaactaaagattaaaaaggaaggaccttcccactctctctcagcatctatattacacatcttatagagagggtcacccatccaaacccaaatgatgtattcactgttaccaagggtggagaattctcctttgccagctggtggcatctgcttgtcttgattgatgagctgacccaggcgctatgccatcagagaggccccctcaagggagtggacactaagcacacagccggtattttctgtcacagaagaggaagaatgagtactactgtgtagagagctgtttcaggggagaaatgggcaaagcaaaactagaggaaatcttcctatcaaacttaatgagtctgaattcgcacccaaatgtatttacatttcaaaatatgtggacatagacctgcccatagtcacattgcatttacctccttttatctgggttggtctcccccttcactgtcctccccaccagactgtgtatccttgctgcctatgggaggtattgcctaatagtctgctggactgaaatcataatgttaaggcttttatttgtatacttacttaaataagttgaacattttggagttgagattggccaggcagctgtaagagattttgtctttctgtagtcaaataaaacagtatgaaaattgcttgctcagccatgctggttgtcatgttgctaataaaacttatgcaagaataggccaaccccaatatttcatgaaaaaaatgtgctttgctgtcatttagtgtcttcattttcattaagttctgaattacaaggaattgcttaaaaataaattttgtggctgaggctggtggctcaagcctgtaatcccaattttgggaggctgaggcaggaggaccacttgagcccaggaatttgagaccagactgtgcaacacggtgaaaccctgtctctacttaaaaaaaaaaaaattagccaggaatgcctgtagtcccagctactcaggaagctgggacaggaggattgcttgagtccgagagtttaaggctgtagtaaactagtgtcacaccactgtactccagcctgtgtgacagaccaaaatactgccytgaaagacaaaaattttaaaaataaaataaaatttgctttgggaaatttctactttacacagtgagagtaagccactgtttctaaaatgaagtttttttwaaattttcatttaaaatgttggtaatttaatgtataaagttggacattaactttggaaagttaaatagctttcactgaaaatgtggtaaattttcatataaacaaaatactagatatctctgagctttgattctgatttaggaatttgaaagttcttggttcttttcctctcccctgccacaggggaacgcatagcaaatttggcttgatctgagatggcatctgcctcgttaattttttttggtagaatatattgcacccagaatgattttggctttcccctcacctatcaaatggattttcatgcagyggccaaactgtgatgttttgctcatttcactttgggttaaattcctatgtctatgactgcaggtaaaatgtctcaagtttcattggggattcagaatgtttcaggttatcaagaaagtgtttttctcctggagaaggctggtgtgtggcttaatgacttctccacatggctccttcctataccctgtgctcattccctgccctggcaatctttagcaaagagaatgaatcctagatgggtctcttttagagttgtagagataaagtatagctggaaaattcagatgaaagtggatctctaaaaaatagatgttaactctagctccaattcttaagtggggaatgaggagtaaatgtctttttctggggatgccagtactaacagtgaggcactttttaaacatrtgtctttcagtttaaatgaaatgattggaattgggctgtctgttaatatgtttctttgcagctatgatatgtatactttttggaaatactttaaaataataaggagctgttgaaaactatgcagaaataacttaaaagaatggaccagttgtgctgcagaaattagcagtgagatgtgtctttacttagcaaaggttgagaacaacatatgagagggggaggcagtcaccagaagtgagcaactccagaaaaaccaccagtataagacacataactatcttccaaacagcatggtatgtaagatgctacttacgttgacatttattttaatactagtaatmataatagtttgctaacatgtatttgtaacatgttaactttcctaaacacattcatgtgttttatttatttcctcaaagacacctatgacattggtagtaaaactatccctgttttacaatcatgaaatggatgcacagattgagtaacttgtccagagtctaacagccaagatttgaacttaggtgatcttcagatgtgggtgattcatgtaccaatatgtcagtcttgaataagaacttatattgtatatgcatgtttacaacaattttgtcccaaggtgtatttgaagatatatgttatttgggagaaaatgaaatagtgccttaagattctgggctttgttcttgagcttttaaataacagtctagtaattctgttttcagtaatggttaatgtgcttgtttcagaccattctccatttagaacaaatagaaaatctggaagtggggagggatatcaatttgaaagtattgagatctacaagatagcaagaatttgtggggccaatattccagggagaaggtaacccagaaaaggagcaacttttcccattcaggcatttgctgaattaaaagtctcatctgggaagctgaaaagctgagtggagtttttggaaaactcaaagagctgtgaaattcatattttgctaaggaggaggagctctggaaaatagctcaagcttttattgggacctcaaagggtttcactgtaggaataagagtgaatctgagaagtgatttctcacagtgactgaagccaagcttctgatcatgcaagcactagaaagaagtaatctgttccyagcctgtgcctctgctagctgcaaaagtgaatccactctggatgaaagtaacattaactgtagcctcagattttctctacaagtttttatttccagtgttattcaattaaaaataaccaggtaccccaaaacatagcacttaactgaaaatcagtagcacaaaaagtatacaaataggaactcttaggagatccagatactagagttatttaacttcaatataacatgggttgaaggagtttaatataacaatgattaaaatatttagagaattgaatgacaaatggaataatttcatagagaactaattctgttaaaaagtgaaaagagattctagaatgaaaatctatgttaaaacctagtgagttggtttaagagaagattttacacagctgagagctaataaattaaccaaaatttctacagaaaaaagtatttaactggatatacagagaagaacaaaagaacggaaaacaccagaaagaatgtacaagctgtatgacatggcaggtctagcatacataattrgagtatcttcaggaaagtcaaaaggcagaggaattgaagcaatattttagtagatagtcactggaggttttccaaaactgacatcaagccacagatgtaaagaagagttatggacccaaatgtgataaacacaaagaaaacttatatatgctgtcatcaaactgctgggaaccaaagacaagagaaagtcttaaaagcagccagagaagaaagacattccaccttcaaaggagcaatataagactgaaagcagcctctcagcagaaataatggaagctacaagacagtggattgacatctgcaaggtacagaaaggaaatatccaccaacccagaattctacttctaatgaaggagaaataaaattatttttataccaacaacaaacaaaaaaacaaaaaaaamamtgaggmaattaattaccagcagaattgcaccaaaggaaacactaaaaggagttcttttggcaaaagaaaatgatcctagrtaaagcatgatcgtgcagggartaaggagcggtggcaaggagtattgctggaggtawwtctgaataaaaattgactgtaaaaattctaagtaataatggttttttgggtctcacatagagatttaaaatatgtgacagcaatagcttgttaactcaagaaaaagagaatggggttagtgttttaagtttcttgagattttcaggatatggcatatgtacaaactgatattgaacttcagtaatttagggagccatattgtaatctctacagcaatcacawaaagaatagagaagrgatatgtaaagaacaagctactggcatggaaattataataataaaaacaccaatctagaagagagcagtaaaggggagataaacaaagaacacagctcaatagagagctcaaacccaaatataygaattatagtaaatatgcataaaattatttcaaaggcaaagattgttagatcagataaaaaaggataggaaaatgtctgtttgctgcttgcaagagacataaatatgaagatatagaaaggatgcaataaaaggttatatcagctgggcatggtagctcatacttgtaattccagtgttttaggaggccgaggtgggaggatyrctagaggccaggagttcaagaccatcctgggcaacaaagctggatcctgtctctacaaaaaawttttttttagaaaagaaacaactttgggaggccgagactggcagatcatgaggtcagaagatcgagaccatcctggctaacacggtgaaaccacatctctactaaaaatacaaaaaaattagctgggcatagtggcgggcgcctgtagttctagctgcttggaaggctgaggcaggagaatgtgaacctgggagacggagcttgcagtgagccaagatcgtgccactgcactccagcctgggcgacagagcgagactccctctcaaaaataaaaaaaagaaaagaaacaactgtggatggtggcatgcacttgtattttcagctactcagaatgcagaggtgggaggattgcttgagcccataagcctgggagttcgaggctgcactgaactatgatcacaccactgtactccagccagagagagaccctgtcaatcaaccaaccaatcaaaaaataaaaaataaataatacatagttacatagcctaaacaaaagaaaagctgacatagctgaactaaactgttaaaaagttgactttaggcaagaaacttaatatccaaaaataggaaactttacactgataagaggttcaatataaacrgaaaataccacccttttaaatgttttctaccttacagcataatctcaaatatgtaaaagacatcatgttgcctaatattttagtggtttgacttcaaagaatagaatgttctaaagtcagaaagaacagataatgttctaatgttctgtatggacattggaaaaatattgatactgattccttctttttgcagatttcaaattcagaccatgtcatttctttccacaatccctttcaaaggaggttggtgttttctgttatccttatgtgagttacttagttgaggaagtgtaaatgtagggctcagcttgaagtaggagagaagagacttggtctcccttttgcaggtggagttggtgctaggtgtcctcccttgggagcttcaggtaaagtctggaatgggtagtaaggctgtttgtttctctgctgttagcagaagtcttaccccagagtacagtggcttcagaagtacctggaaaaatgaaagcataccaggaagagtaagaatctcaccttgccttgttctttggtatttcactcatgcatcaaaaatgtgagcatcaggaaaattgcactggatttctgaatcttctcttcttctcaaacagttatttgttggctattaagagcatctccattgattagaagtggtagagacatacttgtgccttyggaaagggggaatagaatgtgaacacaacctattcttgaaagagcttgaaataatattctataccaagctgattctctttggaactgctgttgtccaccaagataaacagcttcaatcagggagcagttttttctaatcaggtttacagctttgaacttcaatgaaaactgattttctaaattgttagtcagtggaattatattttcagtctggttgtcttttcattcaaagaagctgagctaatgagagcaggtgttggagagaaaatgagccataaaattctctgtatctgttggacctagactgctgaattgagagttgcagaattggccatttgttagaatgcatttcaggatttccccctgaagtttcacaaaacagaaaatttaaacagcaatattagtttttatgtaccataagagaatgaaggaaaataattccttcagctaaaggaaatgatggacatagttgcttttgaagaagtggttgtctaccattttccagtaattgtctttcttctatcatgttacctctgattcttattgctgaaatgtagaagaaataagagcctacaagggaaagagttctctgaacttggaattctgacctcatacttcttacctctcttagctaaagcagaaataatgaggatctagtatattacccctttacacttctgcaaaggttcttaacttatgtaagaatcaagtcaattttctatgtaaaatcttgacagggattgtcagaaaaatttagtgtggaatgaaatggagcctaatttcattttacttgaaactccattacagatggaaagtttgtagtataagatactggcaggtacttgaaaatgcaggtagcagaacagaaattctttggcttgctccctaaccttaaaatactatttaaagatggatcttgtatctgaaagtgcacacacaagattgttagcagttgatcacctctgaggcatgaaattaaagggttgagagagtggaagacttaatttttactttttaaacttttgaaatgttaggagtttttttttttttttttacaactgatatatgtttttaaaaatggatttttaatgacctagaagttttctgtgtaaatgcattgttatataaagggtatggaagagaagcttcactgcttattgcttcatccagccgacctagacttttgatctttgacagatttgtttccaagcaaataattataaataagttatcattttactgcatatccttgaaggttaggtagcatctcctaccctcagaaatgagaatgccaagcaaccgccccaggcagataaacattttatatttaaaggcttccaggggagaatttaccgctctatttactatgaggatattcttgaatatatctattttgagtgactcatgctataatgtaggtgttttcttctccttctcccctggtggaggagaacagctgcttgctaaccttctgtgtacctacactcttacattgttattattagaatgctgtgcaggggggtatccacttaaagctgggtgtgactgagaagtattccagacattatgtgacatactggcatgtagtgattaaggagacatggtctcacataaagacaccagcatgggcctgtggctcagggggccttgtggcttgggaagtgcctcattcccatctccacttagcactcctctatctgatgggattgttccccaccacaaagctgcttttggctccttctctttgtgacttccatggaacatgccacctacacaaagaaggaagaagaaagaaggctgtggtaccatcctatttgcaaagactcagaaactgaccttcctttgaattccatttccaccctctactaaatcttaattcttcatttgttaaatggaactaatagcactgaactcaccttgcagtttgtgagaactaagtaagctttttgtcagtacaaggagtgtggatgagcttcttggtaactaagctcccaaaagacttagatgaaatgaaattccagtttattatttggcaatggaaaaatagagccctccatctgagaagacactgtttcctctggctagcacatgaactacatggagagacatttgtgtatctttgtgaacacagattcagagtaaggagaattaatggcataattcagatgtttgacrttgtcaggaatgtggctgaaaatagtatcccacagcaagtaggtcacagtagaaaaagcagaaggtgcctgggaatcaaacagtcatctgggacaagttgctttttctcagcttctggaaaatgggtatgataacacttgctcatcagcttggtttaattatgagataattcaatgtgaaaaaggcccaacaaggactagactttttcatctccttcctataaaacattgagccatatctgatttgtaattagtgaagttaatgatccagcattctagattcccttctattttccatgggaatggaagaggcttctgaagcctgttttgttcttatctttgcttgcttatatcatgctgtccttgaaaaccatagttacctgtcttgattgcaaagatttataaacaaggcatagtcacactttatacatacatattcatagacatggaatgcaactatgatagcartttgaacagaggaaattaaaaaatgttttgagtaatgcccatgtctgcataaattttacctagtcacycgtctctacttttgtttattgatacccacattagaccagttgaaaaggacagcaggccgggtgccatggctcatgcctataatcccagcacggagggctgagacaggaggattgcttgagcccaggagttcaagaccaatgttggcaacatagtgagamcctgtctttgcagaaaaaaaaaaaagaaaactacctggatgtggtggcacatgtctatggtcccacctactctggaggctgaggcaagagtatcacttgagcccaggaggtctaggctgtggtgagccatgatcatgccactgcactccagcctgggcaacagagcaagaccctgtctcaaaaaaaaaaaaagtcatcaagagtgtgcctgctttgaatgacactactgttatctccatatctaagctgtagacagatggtgtatatgcagacaataagaggcagtatcagtaktccctgtgctgatgcagaggcggtactcacctcaaaaacatctgacttataaatgactcacagataagagcaaaatgggagcattatctcctggctgatgtctcttgccctcgctcctgaaactagttttcagaggacctgtggcttcagaatgctttcctgctccctctccttttatttccctatcattgctcaatctcacatgccatctcttctgggaaacacttcttgaatcctgcagaatgagtttctggcttttctctgctgtgggaaatcagtagatggtctctgagctgagaagtggtgcagaggggcacatgacgggcaggttgacagatggtcacatycagtaggtaggctgagctcagttcgaagggtcctgtgtggcatgctgaggatgttgagctttatctgataagcaacttggaaactagattgttaaaccttgaaatagagtaacagattaaaattttaaaacttgttttaaaatatgtagcctgcaggctgattgccctgtagtctaataaagtgctaacaggtaacctttcgatacagctgggatgctggcttcagggattctgcatgaaagaaatcttcatgcaaaggctgaaaattatagaagaaatattattgcaacaaatgcatgatgatttgctgaaagacgtatgagaatacacctgtgtttacatttcactttgagatttctgtggctcatgggcctgtgacaggacagttctgtcttctccatttgcccttcctgcaaatggagcatggtacaggtatcctcactcctcagggccattcatccatcctgcatccagggactcagtcagtttctttcagccattacctttccagtaataagtgtgttatttggcttgtttgtggctgtttgtacagccaactttttcgacatcagtagaggactagaacaaagcccttgaatacagaaatttgaggtgtgggtggaaatcaagctaagattacatcataatgttcatttcttagagctgctgacaaagataaagaagcaaatgatggaaccctgaaaaagtaaagcaaagtagagaaagagcttactttaatggctttcttcttaagtgctattagaagagagagagggcagatctttcatttgaatctttctaatttcttgggttataaggctcttgcttggccctaagtatttccagcaattaaatcaaagcccattaagcttaggttcatcatagatcttattaaggatttaaatctttatgcagattttatttttcttattgaataggataaataaaggtgaygtacaaggaagttcacattttgaaagagtacaagattacttcaccaatgcttccttgaaatgtggcactgagaaactgcaaagttatgtttttgtttattaaaaagtaagttctgggctgggtaaggtggctcatgcctgtaattccagcactttgggaggccgaggtgggaggatcacttgaggctgggagttcaagaccagcctgggcaacatggcaagactccgtctcttattaaaaaaaaaattaaataagccaggcatcatggcttgccttcagtcctagctattctggaggctgaggtgggaagattgatcgcttgcgcccaggagttgacattacaatgagctgtgattgtgccactgcactctaccctgggcgagtgagaccctgtcttttagaaaacaaaaaataagtaagttcagagggaaacttctagttttattgttgtgatgagaattaccaatataatttaatatattttaatacaagtgttaatatatgtagaatacttaacgcagtgcgtggaaatgttttggagagaagtcttgaaataataagagctagagctatcataatggagactcacactatccttgtaggctatatccttgttccatctactaaataatgtgcctttatttacggagcacctattaagtgccagttagtatgttgataccaaggatatctataaacaagtcctcccagagctgatatcccagtggacgattagctagtcttcaataaagagaacaattcatgatttgatttacttgttactgtaattatatgagtgtctaaaaaatagtgcatccttgaattttagaacagagttcctgaggcagtcagtgcattctggggttttgccccaaagtgcaggaaatatgaaatccaaatttatataaatgagatttgagcagcttcacttataacctaatttctactgatattcccagttttgtgtaaacgtctacaaaatgagttctatctaaagctgacgccaactgtttaatatgtgtattagatatacatatatgtatagatatatatgataaatatgtattatgtatattaatgtatatgttgtgctggacccagtttattcatctcccaggatcttcttggccatycttttctgctgtgcttccctgatccccctctagggaaattccctgatgcccactgcattctttagacacagagctcagatttctaccctgatccttgctggtggcagccaggtagtcaggacacctctgctgggccagccaggcccattattactcccgtctcccaactctgatgtcacttgtgatcaagaactggcattactgcctggcrcctggggcttccatgagccttctgaacttcagtgctcctattctgacccccaggcacctctggcccaagtatgcccactggagttcccataaccctggcctgcrtagcagatgtcactcctgttggggaactcaggcttccaggatggctgccagagggaccagggaaccagtcagaaatgggggttgaggagtcggtaccctgtggtgcaaacattgatggttgaagaccagagctagtagaaattctgctcccatggtggactgtgtgcagattcaggggtttttacagatactctgatctgctgtgcctgtgaaaaccgtggccaggtcagtaaccaacctgccccatatacctccctcccctgcctcaaagccctgcctccctcacaaccatttacatggaagccaggaagtgttttcccaggctccattttccagagaacccaggcaaaagtacaagtggagggctagtagattggaggtttatatttgagaaaatttatggagaattttctgatcctttttgaattgtgagtatttctgccagttttattttttaaatgtttttattttatttttttttttgagacagagtctcgctgtgtctcccaggctggagtgcagtggtgcagtctcagctcactgcaacttcggcctcccaggttcaggcgattctcctgtctcagcctcccaagtagttgggattacagttgtgtgccaccaaacccagctaatttttgtatttttagtagagacggggtttcaccatgttggctaggctggccttgaacttctgacctcaagtgatctgctggccttggcttcccaaagagctgggattacaggtatgagccactgtgcccattctgccagttttttaagtttttcttttagtttgggagagataaaatggattcagataaacagatggatctatgtgctcagtgagggaagagtgcagggggcgggggtctgtcttgttcaatctcagatcccaggcaaagcacctgctggtatatgcaacttgggaaacccacctgctgaagtcacagaactaattagcctttccaagctcaggaatcatctggcctctttcaccaccttttcctctcgtttatcttgttcctctggattatttgcatttaacagaaatgctgaatacttctatttagcagaaacattaaaaacaaggtttgtccagtatgcagggaaataatcttagatgtatgttacaggagaacttaacaggtaaagatccatgatttgcaccatatttgcatggggattgtgatgctcttgagcaaggtagaggcccactccctactctgtctcagctttcctgtctttgtagaccatcccttgctttctggtttctgctcctaccatttcaaatgaattatgctgactagtgctgtcaagtactttccttctggatccttatcccaattattttctggcacagatagcaaatgcattcttaaaagttcttccactgagaaagaagccatttctgatctgacttcctactctgttcctcctaggtccctccctttttacactgtatgtccctctgttggatgagcccatgatctccctgaagccctagtccatgtcctcttcatttttgcatcctgtatcctaggctcttcgctctgtttctagacctttaataaatgagttctacatggctgaatgtatgatgtttcaacctttcttgccttccctacaatttttttttaactggaggtttgcagctctgtaaatcccctaaaaaaattatggtttgtgcttttaagtttctgcttataaagtaaacagaataatgattaaaataaacacactcagtatttatagtaatatgaaaactaagtgagactaacaattactcactgaggattttcatgtctttaatatttgaatgcaatctggcttattgcagcaggactttgcagrtgacagcataatatttaaaaatatttatacttgtacataatcagcattttctacaacttattttgggtaaattgaaatgaccctaaaagttctataaaatatacctaaaacaagtctaaaaacaatcagactttgaaagcttctgttaggaggtttctattgcttgtctttctgaggatctggttcgttttggtggggtcaaggcacaactcggcacacaggtcttccaccttttactcaaaatcttgtgcacctttcttgggataggtagtggaatgaagactgtttgatattggggtgtgtgtgtgtgwgagagagagagagagagagagaatctgcacataaacaggaagccaaaatgctaatatagacaagcagtaaacctactctcttacccccaccctgcaaagtagacatggatatgtaggctgtatatttgattgaatattggggaaaaaccctctccttaagatttctgtcttacctaggtgcctgaaattctgtgctttttgaaaaccactttataatgcacatggtcataagggacgaggaatcacagaaagacatgagcatttagaacatgaattcttgattgttttcatgccgtgtacacctttggcagcctggtggagtctacagacctcttttcaaaatgatatgcataaatgcataacataaaatttataagattatagtgaaatcagttaagttcaaaataaaggtatccaaatattaaaacaaaatttgctgtataatagtaggtgtctttatttatcagtgccctaataatgatatctagcaataagtctattcactcaggtaattttaaagtagtgaatgtaacatgttgatgtgaagtgaatatcttctcattttttagtgatgacaacgtcacaaatactgctaataaaattgtgctttgtcaactacatcatatttgaaggaagtgccacattcaaatatgaataccacattcaggtgttttcaatactttcagttagaaggtattgaaaattaagatgtaattttgttatcattgacgtttctggaccctttgaattttatccatggacacctcccagggatttctctgattccattgaagaaagttttaagcaagtgaatggaggcacaaggagatggagggtaagaaaagtaaaatgggaaagaggaaggtggaaaacaaacttgataactttgctgtggctagttctgctaagactgtgaatggtgctcctatgatattgaataggctaaatgcagttgctcaataaatgtaacaaactcgcagaatcattttaccttcatttgaatctaaagaggacatgattcttctctgattaatacagaattctgatatccccatcaacaggtctcggtatgcagcctgcctgggcaagttacctggggatgtctacaactctctaagttgcttaggttatcagaagtcacagcagagtctttggtgagaaaaaatgaaatacggacaaacttgtaaagggagatttcttgggaaactctgtattgcttccaatagtcatacttagctttcttctattaggtttggggtagagaaaagctgggaataagattcgttctcacaatttcaccatcagtttgctaaaaggcttgtctttttaagtatagaaatggactgtaaactatgggtttgacttaattggtctgagatttggcagtttcatgtgcgtaggtgaatggtgaggcttttacattttttagattaaaaaaattttttyattatactttaagttctgagatacatgtgcagaatatgcaggtttgttacataggtatacacatgccatggtggtttgctgcccatcaagccatcatctacattagatatttctcctaatgctatccctcccccagcccctcacccccgacaggccctggagtgtgatgttcccctccctgtgtccatgtgttctcatcgttcgactccctcttatgtgggagaacatgcagtgtttggttttctgttcctgtgttagtttgctgagaatgatggtttccagcttcatccatgtccctgcaaaggacatgaactcatccttttttatggctgcctagtatttcatggtgcatatgtgtcacattttctttatcctgtctatcactgatgggcatttgggttggttccaagtctttgctattgtgaatagtgcctcaataaacatacgtgtgcatgtgtctttatagtagaatgatttataatcctttgagtatatacccagtaatgtgattgctgggtcaaatggtatttctagttctagatccttgaggaatcgccacactgtcttccacaatggttgaactaatttatgctcccaccaacagtgtaaaagcattcctatttctccacatcctctccagcatctattgtttcctgagtttttaatggtcaccattgtaactggcgtgagatggtatctcattgtggttttgatttgcatttctctaatgaccagtggtgatgagccttttttcatttgtctgttggctgcataaatgtcttcttttgagaagtgtctgttcaaatcctttgcccactttttgatgaggttgtttttttcttgtaaatttgtttaaattctttgtgtattctggatattagccctttgtgagatggacagattacaaatattttcttccattctgtaggttgcctgttcactctgatgatagttgattttgctgcgcagaagctctttagtttaattagatcccatttgtcaattttggctgttgttgcaattgcttttggtgttttagtcatgaagtctttgcccatgcatatgtcctgaatggtattgactaggttttcttctaggatttttatggttttaggtcttatgtttaagtttttaatccattttgagttaatttttgtgtaaggtgtaaggaaggtgtccagtttcagttttctgcatatggctggccagtttccccaacaccatttattaaatagggaatcctttccccattgcttgtttttcttgggtttgtcaaagatcagatggttgtacatgtgtggtgttatttctgagacctctattctgttccattagtctatatatctgttttggtaccagtaccatgctgttttggttactgtagccttgtagtatagttggaagtcaggtagcgtgatgtctccagctttgttctttttgcttaggattggcttggatatgcaggctcttttttggttccatatgatatttaaagtagttttttctaattctrtgaagaaagtcaatggtagcttgatggggatagcattgaatctataaattcctttgggcagtatggccattttcatgatattgattcttcttatccatgagtatggaatgtttgttcatttggctgtgtcctcacttatttccttcagcagtggtttgtagttctcttggaagaggtccttcacatcccttctaagttgtattcctaggtattttattttccttgtagcaattgtgaatgggagttcactcatgatttggctctctgtttgtctattattggtgcataggaatgcttgtgatttttgcacattgattatgtatcctgagactttgctgaagttgcttgtcagcttatggagattttgggctgagaggatgggtttttctaaatatacaatcatgtcatctgcaaacagagacaatttgacttcctcttttcctagttgaataccctttatttctttctcttgcctgattgccctggccagaacttccaatactgtgttgaatgggagtggtgagagagggcatctttgtcttgtgccagaatgcttccagtttttgcccttcagtatgatattggctgtgggtttgtcataaatagctcttagtattttgagatacgtcccattgatacctagtttattgagagtttttagcataaagggtgttgaattttgtcgaaggcctttactgcatctattgaaataatcatgtgctttttgtcattggttgtgtttatgttatggattatatttattgatttgtgtatgttgaaccagccttgcatcccagggatgaagctgacttgatcatggtggataagctttttgatgtgctgctggattcactttgccagtattttattgaggattttcacatcaatgttcatcagggatattggcctgaaattttctttttttgttgtgtctctgcgaggttttggtatcaggatgatgccggcctcataaaatgagttacggaggattccttctttttctcttgtttggaattattttcagaaagaataccagctccttttggtacttctgatagaattcggctgtgaatccgtctggtcctggagttttttttggttggtaggctattaattactgcctcagtttcagaacttgttgttgatctattcagggatttgacttcttcgtggtttagacttgggagggtgtatgagtccagtaatttatccatttcttctagattttctagtttatttttgtagaggtgtttatagtattctctgatggtagtttgtatttttgtgggatcagttgtgatatcccgtttattattttttattgcttccatttgattcttctctcttttctccttcattaatctggctaagggtctatctgttttgatgatcttttcaaaaaaccacctcctggattcattgatttttttgaaggttttttcttgtctcttgtctttttcagttctgctctgatcgtagttatttcttgacttctgctagcttttgattttgtttgttcttgcttctctagttcttttaattgtgacgttagagtgtccactttggatctttcctgctttctcttgtgggcatttagtgctgtaaatttccctctaaacactgctttatctgtgtcccagagattctggtatgttgtgtctgtgttctcattggtttcaaagaagttacttatttctgctttaattttgttatttacccagtagccattcaggcgcagattgttcagtttacacgtagttttgtgattttkagtgagtttcttaatcctaagttctaatttgtctgcactgtggtctgagagactgtttgttatgatttccgttcttttgcatatgctgaggagtgttttacttccaattatgtggtcaattttagaataagtgtgatgtgctgctgagaaaaattcatattctgttgatttggggtggagagttctgtaaatgtctattaggtccacttggtccctgtctgagttcaagtcctgaatatccttgttaattttctttctagttgatctgtctaatattgacagtggggtgttaaagtctcccactattactgtgtaggagtctaagtctctttataggtctctgtgaacttgctttatgaatctgggtgcttctgtatcgggtgcatatatttttaggatagttagctcttcttgttgcattgatccctttatcattatgtaatgcccttctttgtctcttttgatctttgttggtttgaagtctgctttatcagagactaggattgcaacccctgctttttgtttttgttttttgctttccttttacttggaaaatattcctccatccctttattttgagcctatgtgtgtctttgcatgtgagatgggtctcctgaatacagcacactgatgggtctcgactctttgtccagtttatcagtctgtgccttttaattggggcatttagcccatttacatttaaggttaatattgttatgtgtgaatttgatcctgtcattatgatgctagctggttattttgcctgttagttaatgcaatttcttcatagtgtcgatgttctttacaatttgccatgtttttgcagtggctggtactggttgttcctttccatgtttagtgcttccttgaggagttcttgtattgcaggcctggtggtaacaaaatctctcagcatttgcttgtctgtaatgtattttatttctccttcacttatgaagcttaatttgggtggatatgaaattctgggttgaaaattcttttctttaaaaatgttgaatattgactcccactctcttctggcttgtagggtttctgctgagagatctgctgttagtctgatgggcttccctttgtgggtaacccgacctttctctctggcttcccttaatattttatccttcatttcaaccttgttgaatctgatgattatgtgtcttarggttgctcttcccgaggactatctttgtggtgttctctgtatttcctgaatttcaatgttggcctgtctttctaggttggggaagttctggataatatcctgaagagtgttttccaagttggttccattctccctgtcactttcaggtacaccaatcaagcataggtttcttcttttcacatagtcctatatttcttggaggctttgtttgttccttttcattgctttttctctaattttgtcttcatgctttatttcattaagttgatcttcaatgcctgatatcctctcttccgcttgattgatttggctattgatacttgtgtatgcttcacgaagttctcgtgctgtgtttttcagctccatcaggtcatttatgttcttctctaaactggttattctagttatcaattcatctaaccttttttcaaagtacttagcttccttgacttgcattaggacatgctcctttagctcggaggagttcgttattacccaccttctgaagcctactgtcaatttgtcaaactcattgtctgtcgaagttttgttccccactggtgaggagttgtgatcctttggaggagaaaaggcattctggtttttgcaatttcagcctctttgctctggtttctccccatcttcgttggtttatctacctttggtctttgatgttggttggcctttgtatgggtttttggtgtggatgtcctttttgttgatgtttatactattcctttctgtttgttagttttccttctaacattcggacccctctgctgcaggtctgctggagtttactggaggtccactttggactctgtttgcctgggtgtcaccagtggaggctgcagaacagcaaagattgctgcctcttccttcctctggaagcttcatcccagaggggcacctaccagataccagctggagctctcctatgtgaggtgtctgtcaacccctgctgggaggtgtctccccatcatgaggcacaggggtcagggacccacttgaagaggtagtctgtcccttagcagagcttgagctctgtgctgggagatccactgctctcttcagagctgacaggcagaaacgtttaagtctgctgaagctgcgcccacagccaccccttcctccaggtgctctgtcccagggagatgggagttttacctataagcccctgcctgggaccgctgcctttctttcagagatgtcctgcccagagaggaggaagctagagaggcagtctggctacagcagctttgcagagctgtggtgggcttcaccccgttcgaacttcccagtgtctttgtttatgttgtgaggggaaaactgcctactcaagtccagtaatggcagacacccctcgcccagcaagctggagcatcccaggttgacttcagactgctgtgctggcagtgagaatttgaagccagtggatcttagcttgctgggctccgtggaggtgggatctgctgagctagactacttggcttcctggcttcagccccctttccaggggagtgaacagttctgtcttactgtctttccaggtgccactggggtatgaaacaaaactcctgcagctagctcagtgtctgcccaaacagctgcccaattttgtgcttgaaacccagggccctggtggcacaggcaccggggggaatctcctagtctgtgggttgcaaagactgtgggaaaagcgtaatatctgagctggagtgcaccattccttatggcacagtgcctcatggcttcccttggctaggggagagaagttccttgaccccttgcgcttcccgggaggcaatgccccaccctgcttctgctctccctccatgggctgcacccactgtctaaccagtcccaatgtgatgagctgggtacctcagttggaaatgcagaaatcacccgccttctgtgttgatctcgctggaagctgcagaccggagttgttcctgttcggccatcttgccagccatcgatcagttttttagatttttaagcttcccaaggaaagcaatgatcttttcttcctgaagtggccagtaagtggccattatttaactgatggctttttgaagagtgctgatttttctgaggatattctaatgcaagtaattattagatgctttctgtggggcgtggatatcagctcacttgatgtctgaccacatgatgttgctcttctgtagctcctaactggcatatgcatcaggagtatcctcaaggctaagagccccagtgtcttcccttaggctagagattgggccatatgcaagttaatctttgtaatcttatgaaagctcatggttctgaaatgaaaagtaaaactgaagttgaaattgcacagtggcatggtggactttgtcttcaggagatgaagtcggtttagagagctgaattttcaagatggctgacaactggctgcactatggtatcaggaaattttactgcttttaggtgaatatcactctaagctttatcaggcacctttttgccttactcaacataaattaacatgtttgtggtaagttaaggccatgttgaaaaacataaatgtttttctgcagatttgctaaagagtagtggcttacttatgctcctaactacccctggctgctgtgctgcaacttggcatgactgtattttatattttattatgtcttcccttttggcaactcagttttctcattgttgcttgggtgtctgctttagcagtctttctttcctgtgaatttctgaaggtgtagataccagataacataatttttgtgcatatggttgagtacaggctgtgagtcaactgaataaatgcatggatttgacgacatctgttttggctgctcagaggttttgttttggtatatgtactctctagtacttaattttctgtgtaactgaaagataccttaactctaaattgatggtaccccatcccctcctctcttcattacactgcctaccaatcaataaaaaatctgatagacaattttaaatattaaatcacctgaatattttttatttgaaatataaaatcactgaagattttttttcctcaacgatttaaaaatattctttgcctttagttcagctttctcctctgggcctggctgtagactctatggaagtaattctgcctaataaaaaggtttagagatgttgtctaaaacactttagaaaagaaccgtctctctggcagttaactctcatggggataaagtagctttcaaactccaacaataatggttagttttgacgtatctgacctgtttgtgtgcaaagtgggagttcgcctccctggaatgccacttaaggcagcaatgcagctcttgaaagaagttttataaaagcaaaacaccaagctgtaaaggacaaggcattttaatgtgaactgctattactttcgcaagagcccagttgctttcctagaaagccataatgtgattcccaacaataactgtggacatgctgttcctcctgtggttaaatcacatcttgatttcagctgtggagcactgattaatccttctaaagtttggacaatgaatgaagtgaatgaagtttggacagtgaataaagtatcttcctctaccctccaaggtattgatggtcactatttgcatttgtgtgtgctctacagtttctcagtgacagtccagttcagttcttaatttaccctgatgatgatcctaaacttgcgttagccattgttttctgcggtgccattctgtcactttggcatttgaatatgtctgacatagcaattacaacttcgtgttttaattacttaattacacagttgcttactctgttagactggaagcttctgaggggccgtggacatgtctttttcatgcccaatgtcagtgtctgttcactgtaacaggctcacaaatgtttgtggaatgaacaaatgttgaatccccagcctgttctccatctgtggcctgtcttaatgcctcatcctggaggactcagctcagagttccctttctctaaagagctgtcactagcaccccacctccctgagctagcttcagtgccacttttgtgtgtgccctcagtgaatgttgaacgagggaggtgttcacaccattgcaacatcactgtcttcctgccacacctgacttaagaatggggcttgagttattatactcaactttgaatcagtggtgcttacgacagtgcctgggcagtgattactcaatacatatacacagtacattttaaagtttgctgtttctttttagaataattgtgtaaatgataaagaagaaaaaattaaagaaaaagtgtttctgccaatgagatacataaaaggatttaaaatgcctctgttgttattttttgttcatagtgcattgtggtagttaattcaactaattgagtgccaggcatatctcagattatccgtcattggtgatatagatgtatcaaattactgtttctgcttttttgtcagataaaattcagttgtcagcataaactggaatcatgtaagtggtgtaaaagaaccaccgttctttcacatattttaggctaagaatcattttggacaccatcagctccccagcctctcagtatccattcagacaaacaatcctttgattgtaactcaagatatcccatttatccttcccacttcctcatatcactgccttagattaccattggtctactattcccacctaatattttctcttcatgttattataaaattatattattgtgcagttattattcatattattttgctattctacccagtgtgtttatgggtacctggtttgttttttttacccggattgaaaacgattacttgaaagagttatttacaaaaatactggttaaatgaaagaaaaattagccttgaataaaaatacccaagataatcagtggtattacttcttgtacatttcttcccatttccttgtcggcaacaataaaagtgccatttatacaggagtgaatgttggaagtgattcacgtggcatctcttgacagacctgtggagggcactctgtggaggcagaagatgaagagcacttagtatcgagtgcctctgtgagtcatcacagatatgcttctgaccttcagaccattttggcacttaatagataatgtttgtcttctcttgggttgtgtaagctcagagaattggtcatctgttttgaataatttgatcttaaataacatttttaagtaaagccacatgagtgttattatatcattttattgcattaggaagcaacaagaataaaaatatcctctgggcttctgaagagatccaggggtttatttaattgtttatattatattaaatgtcttacttaaaattcatgtttttcaatgaatgttggtagtttttaaatgatagattttattttcatctccttatcttgcattctgtcactaattcttttgtttccttgagaagaaataatagaattagttttggttccatactgtcatcataagcatagtgagttttaacttttatttttaaataagagaatagctcatgtaatttgagaatcgattaattttactttttaagacttataattcaaagctgaagatgaccctaatagcttctaatgcacttttttttgttctctttttaattttctccagagagcatatgccaccaatatttggttatctgactctgagatgtgctatgaaaccttgattatatgttagactaaatcatcagctccagaatctgactgactggattacaatctgcttttctgtgtgaccttagggaagtttttttaaaccctcctggttataaaatgacaatacttctctcaatggttaccgaagggaccaaatgacataaagtgcttagcagagtggctggcacatagctagcactcagtacaggttcggtaacaacaagagcaacagtaacaccaccaccaccaaaaggagggagtgggggaagtcaagatgattgcttgtgcttagaacagaggatgccaagagacttcttttcttttgggctggaagctgctttcacattagccagtcttcttttctttgaagtaacagggccactttatataactttatataactttatataaaccactgaccatgatcattaataaattaaaaaatactattttcatgtctggagcagttgcttagtatttatattcaataaatcaaaaccctggaagattaaaaatacatataccttttggctagaaatctgacttgtaggactctcttctgtagaaatgaagaccattcacatggctctttattggatgttctttgtcgtagcaggtgtcgaaagtgtaaatttgggtctctgtgtccttattggcctgaagagttgtcaacattatattattggtaaaggatcagaacaagctgcagaggaatgtgtcagcttattattctttgaataaagtaggaaaagttttaaaaaaaaaaatcccttcgtatatgtgtctgtatgtttatttgtatataaagaagtatcctgagggaaacatactattgtctaaatgggataagtttgtggtcagttaagtgaaagttaggaagaaatgkttaatttttcctttgaaatctattttttgacattttataaaggcatatgcaatttttgttaatgtttttaatgaaaagttaaaatggggaaagaacgaactgggtctctatgtaaacaaaacagtttgcaaggatatctagaatttagctatcttgtttttatattctgagagctgatataaagaattttccctaatatacagttatttccctggaaagctgatcgatcattcatcatcaagtgaggacatttcaaatgaagcttttaaaaaatgaaatttttaaagtggttatgctagaggcaaaaaaaaaagagagagagaaacacctctttagacctctatgaaaaacgagttttaaaacctaaggttttaatagaaatgtaataagttatactgggttctgaattaacaacaacaaaacctgaaaacgaaatagtgtactcagtaaaaataactttccacccagccaagcttagagatacagtgatagaaatatatgtgtataaatctgtttctagaccacctacctaagggaataaatcaagatgcactgagttcagttattttaattatcctatagctcccacagaaaggagctgaggagctgaaaacactaggagaaacagaaaaccaaaagcttccttcagaaattcttcacaaatggcctggcgcagtggctcatgcctgtaatcccagcactttgggagtccgcggcgggcggatcacttgaggccaggagttcgagatcagcctggccaacatggtgaaaccccgtctctactaaaaataaaaaataagttagctgggcttggtggcaggtgcctgtaatcccagctattggagaggctgaagcaggagaatcacctgaacccaggaggcagaggttgcagtgaactgagatcgtgccactgcactccagcctgggtgacagaacgggtctgtctcaagaaaaagaaaaaaaaagaaattctttacaaatgataagtgacatatcccacagtgggtaaattgttcactgtattatggtgtatcctaggatactatgcgtatcagtgaaacattcttgnnnnnnnnnnnnnnnnnnnnnnnnnnnnnnnctcctgggttcaagcgattctcctgcctcagcctcccgagtagctggaactacaggcgtgcaccaccatgcctggctagtttttttgtatttttagcagagacggggtttcaccatattggccaggctggtctcaaactcctgacctcgtgatctgcctgcctcgacttcccaaagtgctgggattaccggcgtgagcctctgtgcccggccaacatgcaccattcttgccaaagacctgaactttaccatctttactcttttttcagcaaatttgtttgtaaaaaccatttcctccctgcctcttcctttctctctatcccggtcactctccctgtatatttgtatgtgtgtatatacctgtaataaagtcatgcattgcttgatgacaaggatgcattctgagaaatgtatcgtcaggcgattttttttcattatgcgaacatgatagagtgcacttacacaaatcgagatggtagagcctacagcacacctaggctatgtggtatggcctattgctcctagactacaaactgtatagcatgtgactgtattgaataactgtaggcaactggaatactatggtaagtatttgtgtgtctaaacatggcaaaggtgcagtaaaattagagtattacaatcttatgggactgcagttgtgtatatggtccatctttcgccaaaatgtccttaagtgatgcatgactgtgtgtgtgtgtgtgtgtgtgcatgtgtgtgtgtgagaaattcaaaacgtctgtattgatataaactcattaggtgatttaaaaaaattggtttagtcaaattaaattttcaaattggttatccttttttaaatcacatgtccaatcaagtacccaagaaagacatattaattttctgtaatgcattctcaatgatataacatgatccaaaattcaggtcatttagatattgtttgctcttttaaaaactttaaaaaaaaacatttaaaacttttattataaaaatgctcaaaatacacatgagtaagaatccaccctcaagcttgtcttaaaacaacactcatagctgataattctatgggtcagcagttggggctgggctcagctgaatggttcagctgatctgagccatgcatggctgatcttggctgggttcacttttgcatctgcagtcagctgtcaggtcagctggtcctaactgggaaggctgaatcctgctccacattgtctcctgtcctccagcagtctagcctggacctgcccccgtggtagtgagcatgttcacatgttgttcctttctctgctatcttaggtttatttagctctgctatcttaggtttatgaataaaattagatattatttatatatatacttacaaggwtataatgttcctcctgaagttatctaactaatgtgctgccccttaaactgagaggcagcttagtatcatgcttaagagcacaaagtccagagcacatttccctgaggttcatattctgtctccaccacttacaacctacatgatcttgagcaagctacttaacccctctatgcctgagttctgtccttgtctgtaatgagtaaaagagttaatatatgtaaaacatttggaagagtgctcagcacgtattaaatatcatgtaagtgttagctattatcaattcccatattaattgttaatatagatatatatttaatgatttgaaagtttttaataattggttttataagtataattagcagctttcataatcaccattaattattgtatccttttgctcttataattaaatatatgtatttataatttaacagacttggtagcatctaagcatttaaatcacactaggagatttttcactccacgttgcacctagaatgattatttatatttgaaaattcatgtttagatattgaagataaattcaagtgccatgcctagtttgtattactgaccttgttatgctgatttaaagatggatgttggtaacctgtgtaatcgcatgatcattgatacacataaattttatgggtgtaagaaatttccttgaagtaagaactctgttatcttgtcttctaggctaagttcaaatacatttggataaaaactgggaccaaggttgaattttgacatatatctattctatgccagtcacccttttaagaagtattttacgtgatttaccttatttaatttattcaaccacctctttgattaggaaacttgcaaaagagagttagttcacttactcaaggacatacaaggtgtgactgagtcaagatcctaattcaggttgtttggctacagagcttagcttttcctaccaagctcagggagccctcctcaggtcctgcccagcacagtccagagtactttgcttgctttagtccaattctttcacagtaggcactgtttgtttttgagtttatggacgaactgactcagattgagagtgattttcataaggtcacagaactagcaagttttgtaaggtgagatttatctaccagcctgctcttggcaaggagtgtgactctctctgtggcctctgctgttgggatgctgtgtgtgataaaatcccctgcttctttctttcctgaacccttgcaggagcttcaccagaacctcacaagcatatagtgttgaaatgtttatgtaattaagaaatttatccatgttaaaattatacccagcatttgctttaatttaaatttcttggtttagtggtaagataactattttcccagacatctccattctaattgtatttctgctaatgcagattgctttttcatattatttgctaattatttattggtattttgatgctttttctggttaattaatccaacagattacttaagttccagacttttgataatttataaacttgatactgtgttgttagtttaatgtggacaccgtttcattttctccactgactcaccttgttaaattttgaccattccttctttctgccttctgatcaagcagtgaaaattcctgcatgactctggtttctgaccctagttgggctaatgaaacatcctttggcttcttcttcaggaatgtggggagctgtcaatcagggatgtcaacagaacccttggagtcttttgaactgttttttaggacaaaggatgatttagcaagcttcttctgagtaccactagcaagtgtttgaatgtgtcaaagacagacctttaaaatatttaagtttggcctgcattttatgtaaaagctaactgcacaatttcttcttaaggcaagtcatagtttagctggtagactatcaccagatagctctgatctgcagaccatactgagtagcataggcttttttttcacatgtggaaaaaaaaggtttctgaatcaacactaatttaggggaaaaataaatggaagcttatattgtgatggcttatgtcattctgagatttacaacagaaactaacccgtttctaaagatgtcaatcaatgaaaaacttgacgtatgggaaattaaacagtctctttagaacgttctaaatagtcaacctgtcactactcaattgttgtatgtgtggctcatttcctgagatacagtcattagcgycatcagatagttaaaaggttgtgtttgctttactcagtgtttgttttttacttataaattacaaagctcacacctagtattttctacctaagtcactgaagcagtttgtctaaatgacacactgtaatacaatttagttctcattaaagcttcccttttcttataaaaggagagcacattgcttgttactacagaacccaccgggtttcctctctgcagtgagcctcttccaatactgctttgtctcttatgataactgtgtttcacaagtcccttttaagattgatggtcctaaatccataaagtttacagccacttctggttgttacttatgtaactgttggtgaacttaatgatctgatttgctaattctgtgaatctctttttattctttctgtgctcagtgaaaacaacttaaaatatgatatacaactaaactgtgaagttcttgctgcaggaataggtccaagtttgtctcgtttgtagttctcaaagtgccccaatacataatgggtgctcagatgaatcctgccatggctaaaagtgactagttaaggtgaaataatatatttttcttcagctcaatatttttatgaataataaaaatggcygttcagttgtgctgtgaatcactaaattgacaattgaatatctttttggtatttaatataaatgtcttaaagcaaaggttataagcacatctgaggtatatgagctgtgcttattaattttgtagcacctagattcatgtggaattctctcaagtagaacagagtaacgtgaactaaatggcatgatttgtagaatgatccatgccaggatgatcccatcagctgctgtccctggtgagggagtgtattagtccattctcacactgctatgaagaaacacctgaggctcggtatttaaaggaaagaggtttaattgactcactgttccgcgtgactgggaaggactcaggaaacttagaatcctggcagaaggtggagcaaacacatccttcttcacatggtggcaggagagagaagtgccaagcagaggggggaaagccccttataaaaccatcagatttcatgagaactcactcactatcatgaggacaacatgagggtaaccacccccatgattcaattaactcccactgggaccctcccacgacatgtggggattataggaactacaattcaagatgtaatttgggtggggacacagccaagccatatcagagagtaaagggatgtgcagttggttagagagttttacttcagcttccctgtgatacagtattacttctttttgctatcttactgtgttttcaccagcatgtcatgaatggggcaaaaattaatacaactaacaaatggtctttttcagtagttgttgggaatccacaaggaaggcaagaagagacagggcaaacggaaagaaaatgtgtcatttgggagaagagagaatttttgttattcatgtcttattccctagtggctgagaaataagtattttatgtttgtaggaagggcatagaagaggcagtagcttaggagggatatatgatatctggtctgcagaatgtgaatgcagcttggagactgtggtttcatcagactgaaatgggtgctaataaacatttttagggcgatggtggcacctccctgcagaggctttgttccctttgagctttgctcccgtagttcatttatttctccacaggccttcctcttccctatttcaggaaatttctggagacatattctttaggagctgtgtcagtactgactgagggagttggaggaggggtgtaacctggtattatgataatcaggggatgagatcaaagtgtaaaggacaaattaaaaatgaaaagctttcttaggaagcagagcacagtggttttgattattgggaggagttgcattatggtcttaaagcatttgtgggctctgatgtcagttgtaggttgcagccagaattgatttgattttgcaaaatgcaattgagttagaatagaaaatgtacatgcagtacatatatacacatggttagaagcgtagtggtacacttttttttaatgaaagcctgggtatgtgtgtgtgtaggtaaatgtatatagagacatgtcgctttacacatgtatgctgaaatgtaaagaacaatatattggcgtggcacagtggctcacatctgtaatcacagcacttgggaggctgaggcaagtggatcacctgaggtcaggagtttgagaccagcctggccaacatggtgaaaccccgtctctactaaaaatacaaaaattagctggacacagtggtgcgtgcttgtaaacccagctactcaggaggctgaggcatgagaatcacttgaacccaggaggcagaggttgcagtgagccgagtttgtgccattgcattcccacctgggcaacaagagcaaaactccgtcttggagtagggcagcgggggaagtacaacctattatttcgtactgagttagtcaaaatgtttgaaaaatattagtcttaggagcactgcctttgcagtttgaaggtaaaaactttgcattccccttggccctatccgatgctttcacttgtcctctagtgggttcaccctgctctctctttcttcagagcttcattgttgtgaggatttaattagatcaagttcatggagcacctggcttaggcactggtggcccattttgttcccgtaccctcttcccttctccttaagacatgcagatgtacgtggtgattccatgtgccgtggcctattggcaccctttattttctcctttccttgaagccgggtcttttctatattcagagcctgggtgcagcctttccattcaccatgaccatgtgtgtccacttgcttcccactttccctcttcattttcttctgcaacgttctttcgtagtcaaaggggttggcttttataacttacctttgggttaagaaagcagatttttctttttttcattcttttctttcaattttcctcatctgctgttgaggaaaaatgtatatttgggtaccaaggatgctatattgtttactctttgctataactttaagcctatgctactcagtatggtcggcagatcagagctggcccactcrttgtttctggtccctgaccagtacagaaactgagagcaagtctttagaaaatttttataggaattggacagaataattttatttcatcgaataataacaaatctggggctaccatgttgtgtgactaaacaatttcatttttctagcaattcatgtttattgtattttatataaattggtctgagatgcactggacttttttttttaaaaaaacaacaacaactggtttttcattacaggttgtttgagaagtgctgctctagtgaactgaattgttctaactggttgtatctgcataggtcagatgaagcacaaataaccccataaactagagtcaggagatatgcctgcagtgatggaacttgttaacattttgtttgcctctcgtattctaaatccacaaatttaaaggcatggtcatacaagaaaaaggcaaaacagccaaagggaggcaaagaccaataatctgtggcttttgctaaaattaagaagtttaaaaagtgaattttataatagctttaaagttcataaaatgctgcttctctgtaagccaaagtattgaagaagccatgtaactctttcttcctgctggataatggaaaatattcttttgttgttgttgtttgcaaagtttctcaaatacacttggaagagaattcatgtagttttctcagccttgacaaatctagagctccaaacacaccaatgcaaattttaatgatgggttagaaaggaataattctgtgcagttattactgctgtcacaaacaatgatggaagatagtttaatcaaaagcctttgccagtggatatgattggctaaatttaattcacccagagatttgagaatgtgaacattgcatgttcttatcaaagagttttcctttttggggaaaccaaaataattattcttaagaagcttctaagtctgcatctaaaggctgtccctttttgaagctgactccatcatgcagagctcatttcatttgcctgcaatggtatattttctacttatatactagtgacttaagggtgttttgttatctgaacacaaacggaatttctatgctaatttgaattatgattttttaaaaatttaccgagctggaatgctttttgtaggaggaaagaattgtaaggaagtaactacagagggagacccaattactctttgaaaatgcattacctcgcagtcaaaacatttaagtagaaggtgaaaattaaacattcagccatatagggatagtttaaaaaacagacttaatagtctaaaattgaatataaatgctttgaattctgtaattctctaaacattggttggtgagttgactttataccttcatagcagataggtgataaaaacgaactaagaagcaacacttctctccctcctgccaactgtaactttactgcaggttgctagactttcatatttgcttctgtaaactcattggcacataatagtacaccactgtcaggaaacacgagtgtggatagaaacgtcaccttttgtactttaaagctgtgagttaagtcctgatggccacacactgaaataaagataccctttccccaaaaacgtaaggggaagattaattgagttgaaggttttgtgttatctcagtactaatgttcttctctcgtaaagaaaggaaacttaaaaattaccacttaggtgaattatagtaggaccaggagagttgtgaggtgaacagggggaaatagagataaatggtaaagaattccagctgggcacagtggctcacacctgtaatcctaacatttgggagggtgaggcaggaagattgctttaatcttggagttagagaccagcctgggcaacatagtaagaccctctctctacaaaataaaaaataaaaaaaattagcagggtgtggtgatgcacacctatgatcccagctactcrggaggctgaaatgggaggatcacttgagcccaggaggtcgaggctgctatgagccgtgactctgccactgcactccagcctgggggacagagtgagaccctgtctctaaaaaagagccacataattttaaaaagccatacatttaggagggttgtggagctaaagtcatcataatgaaagtcaggagcatttgctgggcttgtgttttgtggcaggctttgtcccgcttgccttgtatgcattcgtggttaattatgaggctgcatagatacaccaattgggagactgtagaggaagggaaaaagggaatctcacagaggagtgtaccgcaggggaaggtgcttggcagagacttttcctctaaaagatcatgagtgttgaaatctgagtgctgcttaattgatttccagatcagttgggagagactagctgtgctagtgaccatgggggcagtccagacagaattgcctcccaaggacctgaacccctgccagaggaagactgtgcatagagtctgcatttccaccaaagccctgcccctgcacttgagaagcctctcatgaatttcacaaaatcacatgctgaaaatagcagatcttaggccaggtgcggtggctcttgcctgtaatcccagcactttgggaggccgaggtgggtggattacctgaggtcaggagttcaagaccagcctgaccaacatggtgaaaccttgtctctactaaaaatacaaaaaattagccagggatggtggcaggcacctgtaatcccagctactcaggaggctgaggcaggagaatcgcttgaacccaggaggcagaggttgcagtgagctgagatcacgccattgcactccagcctgggcgacgagagcaaagctccatctcaaaaaaaaaaaaaaaaaaaaaaaaaaaggagagagagaaaatagcagatcttgtgagaagaacagggttggggctgacccttccaaatctatgcagctttgtagctggcaagtgaacaaaaacattgacaaaactaataaaagtgctggctctctgaactccactctggcacagaccccatgagaccatccttggccctgaaccccagaccctgaacccaaggcctccacttcttcccactctccatagaagtcctcgaagtcattctcttctaatagagactacttgctgtgaacgtaaaaatatcatctgaggtttgtcttcttcatcagtccttttcttttttttgtcctttttaaacacagaggaagggggcagaggcttcacagttcttcacccgttcttacagtttcagagacagcttaggagtggaaagaggaatgaaaccaccaaaccccccttcttgccactccttgcattgaggaaagatccacttctgtaggatcttcagctttgtttaaaagacatcatgcactgataaagctttccctttatttgagaggacagttgcccctcatcacttcacaacatgaatgtcctgcaaaaaattgcacakaaaccaagaggacttgtgtgtaatagggatgtcactcccctgtctagtaatcctctatgagttaatctgcactacagaagcatgcctcaaagcaaaatagactattcttagtcaaacagggaaaaaaggaggagaaaagactataaaagctaggatcacttgagtaacttagattatacctgaatttcacctggatctcaacataaaaattcttgtgtactttagacacaagagtgtaagagcatttcatgctggaatggagcagagtggatttagcattggaggcaggctgtgtagctagtaaaataacagttttggaaaactgggtgatttccttaacwgtaatggtagaaaggtacccagtttatgtaaatatgtgaaaggaggcccctctgagtgcttcacaggatgtgggcaacacttattttgccgtcctgtgtatattgccgtgctttccacccatgcttgcccaagcttaagtgatgggaacaatgagagatacaatattcttggcaatatggccatactccaggttttgttcattcagacgtgacctcaagaacatgtcatgcctcagctccaccagtaaggatatatgtggtaactgttgtagataacagagcccccagtgatagaatctggcgtaaatcagcttctatttcactaagagcaggaaaacacaatctgtaactcatacacaggaacgtcctactctggatttatgatggggttcatcaaccctgcatgttttgaagattttttacatttgtaaacagtaactaacctgaattatttcaatgatactctcgtcacttgttctttctctgcccctctttcttaaatgacagttaaagttcttccttaatgctgaaatatatttcataggtaagttatatttcacagataggttcgcttgtgacttggcttttgtatttctaggtacataacattcattgcttgaaaaattgctctgttttaaaatagctactataatttcccttcactgctgtgaaagggtatttttttcatatgtgttcaaaaagcacatgaagaaacatggggttactggagtgtggcataatgagtaatgggctggaaactcagaagctcaaagttctggttttgccactaactcatcctaaaacctagataagctgcttctaatctctctgtgaccccattcctgtttatcataaatggtgttaaacctggctcacctcatagctgtaaaggtagcaaccataagaaagcatatgataatatagatcctttaacaacaacctcttaatcggtgaaggatatctacatctgtatttttcatttgatacttacagtcattctttgggaattactataaaaaagtggtcttcttgttttgctgtttaggcaatcacagcatgtaaacaagacagaaattccatacattttctagtaccgtgtatgtgtgtgtttactgataatgtgtgggtagacaataaacacatattaacatatatacacaccttgaacattgtgattcacaatgagggtacccatctgtgtagtatttttatttttttcatttttatactccaagttcaggtgtacttgctccttagaatttcaacgcattttttctctgtgctaaagccgacctatgatagcctattttcccttgtatcttagaacattttgcttttatcttttactgtgtgaaatataaaattcatatggggaaggctcaagtgcttggtatctggaaagcttgaatccatctggaagctcctcaacactcatgggtaggttagggccattggggtcaagatccaaagagctcgtgagacttcttagaatgatcgtccttcagttgggacaatgattgcctaagtcatcaccttgttgtgagaacacctccactgtcaaggagaagtcagttgttccagtgatggaggtggggtactggtgctgaagtgcaagaggatcgtattacattgacagcagggaacagatgggrccaatatcatgaccctaagatgcacagcccacccaatcttttgtctttctctaggttatacagagtgattactgagtattgctaacatgatgggacagtgctgttcagtagaactttctgctggatggagatgctctgtatctgtgctgcccagtgtggtagctacttgtcacacgtggctattgagcacttgaaacacagttggtgtgaatgaggacacgcattttaaatatsgaattttaatttttattttaaataatcacctgtgactcctgactgctagacctaaggcgagtctacaaacattatgctacatttctgttatttagaagtcaaattacagtaacatccagggaattttccattaatactatgtgcactcttgagaacatatagggggatgataggaggaggaggtggtgatatatgaaataggaatggaagaaatggcagtttaagcctaagtaagacatggaattgcagtgccaacccatgtaaatggtggtgggttttcagagataaccagaaagtagtgtttcagggtatgactctccttrattttgtttttgcaggytctttcatgctggtgaatgcctctgggagacctgaggggcagagagcccacctgctcttaccccaacttaaagaaaatgacacccactgcatcgattttcactattttgtgtccagcaagagtaattctcctccggggttactcaatgtctacgtgaaggtcaataacgggccactggggaatcctatctggaatatatctggagacccaacacgtacatggaacagggcagaactggccattagtactttctggcctaacttttatcaggtatgtgctttctttttattacatattttgaagcatcctctaatttctaaaaatataaattattgttatatcattataatcagaaaaggttgttgtatttttgttggcaaggttgtggagaaagggkaactctcatcctatactgttggtgggattgtaaattagttcagcccctttgtaaagcagcttggatacttctcaaagaactgaacagagacttactgttcaacccagcaatcccattactgggtatataaccaaaggaaaatcaattacatgagttcaggtgtttttttggtagaatgtttatcacagcacaattcataatagcaaagacatggaatccacctaggtgtccatcagtggtggactggattaaaaaaaacatggtacatacacaccatggaatagtgtgcagccataaaaaagaatgaaatcatgtctttagcagcaactggaagccattatcccaagcgaattaatgcaaaaacagaaaaccaaatgctgcatgtttttacttataagtaggagctaagcactgggtgcacatggacataaagatgggaatagtagacactagagaatacaaaaaggaggggagcaagggtggaaaaactaacttttgggtgctgtgctcactacctgggtgacgggattaatcatacctccaaacctcagaatcatgcagtttacccaggtaacaaacctgcacctgttcctcctgaatctgcaatttaaataaatgaataaataaataaataaatttttataacagtgcaagaaaaacctatgctatttgataaggagtgtcttaaggctttgtcaaattagtaaaaaatacaattcaaaatttgtttatgcctggcatgtattgttttaagaaaataaaagcagtcacttgtaggagggcaagaaatgctatgtacggggtttgcaaatatattttcttttctttctttttttttttttttttttttgagactgggactcgttccatcacccgggctggagtacagtgttgtgatcacaattcactccagcctcaaactcctgggctcaagtgattctcccacctcagcctcccaagtagctggaactatagacatatgccacctgtcgggctaattttttatattttttttgtagagacagggccttgctatgttgcccaggctggtctcaaacttctggtcgcaggtgatcctgccaccctagcctcccagagtgctagaattacaggcatgagccattgtgcccagctggatattttagtttctatattaagtaggccatatgtgacgcagaaaggcatagcacctgagtctaaaagaagacaccctctgcaaatgggtctcaggagtaaatgagatgagccctgtggagacgagccagtgaggggcaggtccctgcttctacccatgtaagcaacaggaagaaagtaccagatgtagatggagtccttgtcacagaggcactgccacaagacctgtcctgttattttgggggctctgtggagacctgcagtaactgctttgagttcctgtttaaagtaactgaagggcggaggcccatggacattcagaagtggtaccaaagcagttctgacgtcacgtcctgtctgcccttctgtgggggattcctgtgacacaagagcatcctaacttaggatcaaagtgggaaattagtgacaatgggcatttggagagctttttcttttttgtccacagcatcttttaaaaataacagtattgaaaatactcaattaatggccaactacgaggaggaataaagaggattgcaatattttgcttttctctttctttaattcctttggctcagacaggagccagctggaacatgcatctaagatcatttttcatgtttaattgaggtgcttggctagacatagggaagggaaagctagggctttccagggctgcttgtcttcaaaatgggcgtgaacagcatccagtaatccattctgcagctttggtgtttatgagttaagatccatcaaccccaatttctctctccctggactgatgaataaatgggctgtaaatttcttgcttaatttatctttgtaggcatatacctacaacaatttctaggatttaatgagtgacaagtaaatgtgttgtttttttttaatggaaatgaagacatagggaaagctctgtgagtacacgtgtaaattgttaagatctttttagagtatgtactttggcagtaagttttaaaattgttaaaaaatttagatatgcttaaatctagcagtccactattaggaatttatcctaaagaagtaatgaagagtgattgcaaataattaactactgggatattcatagcagcttatttatagtaaagaaaaatcagaaacagtatttttccaacaatagaggatttgttaatttatgctacctcaatacaaaaatttattttgcagccattaagaataatgttatggaagaaaatttaatgatacatttaaggttatgttgttaaatggattaaacaggtataaagcaatacattaaattctatttttaagtttaaaaaatctaataaagactgaaatatatcctgaaataaatacttaagaaagtggtatcttggcagggcacagcggctcaagcctgtaatcccagcactttgggaggccgaggtgggaggatcacctgggtccaggagtttaagaccagcctgggcaacatggcgaaatccagtgtctccaaaaaaaaaaaaaaacaacaaaattagcaggacatggtggcgtgygcctgtagttgcagctactcaggaggctgaggctggaagatcgcttgagcctgggaggtcgaggcttcagtgagccgtggtcatgccactgcactccagcctgggtgacagagtgagaccttgcctcaagaaaaaaaataaaaataaggaaaaaagaaagcagaatctctctagctagtgggataacaggtaaattttttttttttggccatctgttatattctcagttttccccaacgtacatgtactgtttttatttataaaacaaaaagtaaaaatttgtttttcctccagaaggaaaatatctttttaataaacacatgctttttatataaatgtactggtgaccaatcagtagtttaaagcatatggcctctgggacaaaacttaggaaatgcgtttcatagggttaaaaagcaagtgggtggccgggcgcaatggctcgtgcctttagtcctagcactttgggaggctgaggcaggtaggcaggtggattgcttgaggtcacgagttcaggaccagcctggtcaacatggtgaaaccccatctttactaaaaatacaaaaattagctgggcatggtggtgcgtgcccgtagtcccagccacttgggaggctgaggcacaagaatcccttcaaccagggaggcggagtttgcagtgagctgacattgtgccactgcactccagcctgggagacagaacgagaccctgtctcaaaaaaggaaaaaaaaagaaaggcaatcagtagaactgggtttggccaagctaggcctccagaggtttttgtatggtggcctaggctgagaagctgaatgtgattaaaaaccttcttttggaggagcctttcccaaagtagggaagacagggatctggaatgttcccactgcccctctgggacctattctaggttcttcctcagtctccagttgtctgctggattgaggccagtggacagcactcctagttgatatcagaaggtatgtcctgctcatgttttccctgagtttcttctcttgggccttagcagtgtccacacaaaacctctagaatgggctttcttgagaccatcacagcctccagagccacagtgtgctggtttagcgtggccttggctgcagtcagacgtggaatttctgttttgccttttatgtccctacctcagtcagctgcattaaaggaatgatgcggtttatgaacagtcttggaagaccagactttaaaaaggaactgttaaactacattgagagtaagatggtcccatatatttcaggccattgtcattttcagtgaattcttacttatcttgagcacctttggataacatatttcaccttcccaattgtgaacttttctgctcctaacctttaagccctctcacttttcactgtcatcactcacactttactgagcagtaaatgatttgccaaattaagttagaagttttttctcatagctttttggttcatttttgaatgtattgcttcattgatatcttagtctgctgtgctgcagtaacaaaataccacaggactgtacggcttaaacaacagacaatatttctcacatttctagtttgagaagtccaagatcagggtgccagcatcgtccgattctggtgaaagttctcttcctggtttgcagatggtcatcttctttctgtgtcctcacacagttagggggaggtcagggaagcaagagctctcacgcctctcttcttatgaaggtctactcccatcatgagggctgtcccctcgtcaccccatcgcctccccaaggcccacctcctaataccaccatttttgggattagggtttcagcgtgaacttggggagtacacaaacattcagttcatagcactgatagattcattaggaatagcttcatactttgaatttaaagatggatttgtagagattctttaatacagtgttgctaagtttttatttttttgttgttgggaaaatttttattttaaaatggaaatggaaatatacaggaaaagcttgtgctttccttttttttctttgcrtaaacaataataatgcaatccaggtcaaagcacaaggcagaaacttgagaaaagaacagttattacaagtacatggtcttcttttcaaatatccatgaaaacgtttaacgactggatggctaggtacctacagaaagctccaaagcagtaatctggccttttagtttcaacaggactattttgaatcttagatttatcagtcactcctttcccattctacttgttctaagaattaagtatataatgaaaataaaaagcccacatcctgactttaaatctccactctcctaaaaacctgtttgaggaaacaaaaatggggaagaagaagatcagagcaaaaatattgttaacactggccgccctcatgcaggtgggctactaccaactcctgatgaacatctgtaaagagtatagatctactgaaaacccacttgtttgtttaattcctgagcacttccagcaagcatcggccttggaacttttaaagacagagttaaggtagcacttccttattatttcccctttatctgctgggcagtaaacaaattgaaatcattgccctaatagcaatataaactattaggtaaatggcacattgtagatgcggcaagagaaatgtcagcaggaaacttcccagacactgaactgcaggccttaaaatcgctatgtaagacctgaatgaggtttcccagttgggttaagaaggacaggccgtattcacagatacaaagtaaaaggaagacacctaccaaatccaattttcacccctggcctgaggtgtcagcctaattagagatggtcagaagaaaagcctggacaaaaaacaaaacaaacaaacaaacaaaaaaacaataagctctgaagttgagccaggggaggggcttccttgggctgcagatccagtccctagtccatggggccagcacacgtgtaccgaggagatgcctgttgtagtctgatgctctcagaaatacaagtcatgcaagagcccgtctgcttttgatatgatttcccatatagatttctttataaggagttctgtactggcctgaaaatgtgactctggtttttgactattatatttctgattccaaaatataaaaaatatattttccaagccaggcatggtggctcacgcctgtaatcccagcactttgggaggctgaggcaggcggatcatgaggtcaggagatcgagaccagcctggctaacacggtgaaaccccgtctctactaaaaaacacaaaaaattagcgggcgtggtggcgggcacctgtagtcccagctactcgggaggctgaggcaggagaatggcgtgaacctggcaggcagagcttgcagtgagccgagattgcgccactgcactccagcctagggggcagagcaagactccgtctcaggaaaaatatatatatatatatattttttaatattttttttccagtattatgtgtgcatggatacatgtgtgtaacattttcttatgtgaacatggtgcataaaactcaatatccaagtgatgcattctcaggctgtttctaggcctgaaagctgaagacaagataataggatatgggcatctaaaggaggtgacacctttgagaagccctctctcaaggtacaggaagtcagcttcctctagacaccacctctacaattattacgtaggctgcaggatatattctagaattctaaaatattaatataagtttcatgtatacttgaaatatttatgtgttaaaatacttcatgcagtactttatttctataagcaaatttcacactagtaagtagttttgatatgagtgaaaattgattaatgaattcttttaaaggaatttcatattataaattgtttgcacatgggcagcatcagaggacagtaaaagaacatacactttgtgttacaaagaatgggatttgaatatcagccctgcttacttagaagcttgggcaactgatttaaactttatgagcctcactttcctaattacagcggggtggggggtagtgattaggggtaattaggggttggagatgaaaggaaaagcacattggggatatgctagcctcttaagaagcggtggcagtttgttgagccactgttaagatttgtggaagatggtaaaaagagggaaccagttaatagttgatgctttctccctgctaaggcgcttcctaaatgtgtttagtggaatgtcaaaaggtgttaaatgaaaaagggttccaggaacaaatccttttgtggaacactgcatgagacaaagtgaaccaagttcccttctgtcagaacattccagacctgctgtcatacagcactgcaaggtgaggttctgtgagggtccgtgcagttctcccttccctggacttgtttgactgcatctcaaggaccaggtgcccttgggttgtattcagggaccgctgtgttgggctcttcagttggctatttcccatgaccttctgtgccttcttccagaacgtccatttctcacttcgctttggctacaaaatactgagttaattttcatcttgatcagcatctgaactctgcaattgttggactaggcaaagttttcaggcaatctagacacaagtgtcctgtgtacttttgataaccataataggtcttttggggcatctcttactttcacagttttttcctctagctttaatattgacattgttagacatttatagaattttgaaaagtttcttagcagagtaaagtgttcttgccacagtagtcattttgtgtagtttttactatttatggtagaatagtatgctacaggtacacatcacaatggtaacctgcatggaatacagctaatcgcaggttaattactgttccttaaaacataaattgccaagtatttagtgattaacacatatttaattccttaattaatgtttttcctaattgcttctgtgttgacctgccctcctatggttgggaagcagtggggaagggcaggtacctgccatcctcagggcacctgcctcctttgatttagacattgattttttgccatttgaagaataatattttcctcatgtactcgcccttttgctttattgtgctgataaaaaaaaagaactctgctttgattctgcacccccgcctcctgtttcccacccctacaccctgaggcaaaggagctagccacagatttcgtcatattctaatcatgcatgcaccccagaagcctcagctcctacccagaatttcagccttcctctctgctttcagaagacagtgattttgagcccagtcagaggccagggaggcagtgatctttgatataaatggttgctttaaaaagagaaacaatgcataggtagctgaaaatctccttcccccatgggtctccataaagaagtggggctggggagggtgggcatggactatagggaatgggaggataaagttatcaaatatgagagccttgtgggttcacgagagcctccttgttaaaacaaatgccttagatatactgaagggtcctgggagaagattaggtgtggattcagcttgcgccctgcttggagttctttgtgcagcaaggactcaaaggaacttgtactggggagaggggcactaaaccaagattcacccttatcagtctgacatctttcctggtaaaagaggagttgagggaatagggatgacttgatcttacctatcttttcacattttgctgcaaactttattcccctgcacagctagctcggtgcctgtttctttgctgtatttgccttcagcccactgattttactacaaagccatgtaaagccacagctaagtgacagcaggcccgcatacatttgctgcctagagacagtgttttagagttgaattggtgagtcttttctagattgtgttccacaaatccagggaatgttaggaggcattaattgaccaaatggaaagaagcactgggttaaacaaagtagaactgcttcgttctgcaggccatttcggaggctaggagtgtttttgaatctccgggaaggacacatggtgagtgtgggtgcccagctggagccagaatttgggctttgctgagtatttcttgagtctagtgttccctgaagtacacttgggaatactgatatgtgccagttgaaaaatagaacatactttgactccataaattccttggctatggcccttattccaagtgcaagacaattgaattgcttcatgcctctagaggatgtggggaatttgctgtggcagtgaaatatcactctctctcaagcaggaaagctagtctagtaggtgccgcaatactctgcattttgtgcttaaaaaagacaatatgtctcaagaagccactggggacacagtaggttgtcagtttaatattgacttagaactgtatttaggaagtagaacaatttgcgtgattgttttcaccctcaaagatcttatttttgattattttttaaaacttgccacatctctaaatttcattcttaacttgtacttcttatgtgatgataaaggataagtacttctattgtttaccatcttaatctctgcrtggtctgccgctatatgcatatcaaccctgttctttatgacttctaagccatgtttttgtcctctaccttaatttctgtgcacggcctcttgaatgagtatatgacctatgattatatcatacttttctctaaagggaaggaggaaacaaagagaaaagtgaggaaggttgtgttattggtaggaaaaacaggtgaagacatttaaaaataacattgcaagcactaataattagctccattgcaaattttgctgtcttttgagtgcctttagctttctcaaagtagatttttattttattttctgataacatgtcaatacaaacacaaatgcttgaatattttgctcctgattcttaatgtgacatgttttgtggttttgcctggactctttaatattaaagaaactttactgtatatgttttatttttatgtaactcatttgacacaaacaagataaagtttttgtaaatgggtgtgacccacctttgcattttatttaaatcaaaaccagaaggatagactaggtaatgtgtgggagaaccaacgtttaatcccctttgttctagggaactgactaatgacttccaccagcacattttccttggtgagtatctgtgttggtaagcaaatccctttctttgcttacacatagcaaggaaaagtggcagcatggaaagctaattttgctcttcactgaagcggggaggatcagggaggctgtggtgttaaactgcttctgcatttctcctgtttggcagacatctgaaggatagcctgatgtcaaacctctcagaggccagyatccaggatggattttcatgagcaaatgagagcaatagtcagtttaaacaactggtttaaccagttgtttcctctctgaaagcaaatggcttttcccacagtctccaaaggctatagggatacaacatcttgtctcctgaaatgctattagttgagattgaatgaatattgattctctctattctacattttcttacatcccagggctgcaaatatctgggcgttatcagcaaaacagtgaaatggagactcagagtgaaccacatcacatgaatagagttgattctcgattatttgcagcagttatgttctgtaaaattacagagaacactgaattagtgaatactgaactacttctataggaaatatggggttaggttcctgtgagcctttggtcacaatgtttttgtaatgtttttgtctactgatcaataccggatgccgtatgtaatttatgttgttgattcattaactttgaacctatggcaaaggccagtaccactgtaactcatgctgactggagcgcttctaacatgtgtattttttccttaaggctcatcttagcgtccttgcactctcaggagcactagacagccctgaagcactatatttgggttcattttaaaaagcaacgttaccaaaaagaagcacaaaaatggaaaagcatggcactaactagaccacgataaggatactcttttatagtatcagagctgaaacaaggcgacagaacattgccctgcctgacttcagctaggaacatgtgtgttgagcaactcacattttttgctgctctgtgcatgtccgcagataccatgaaagctttgcaagtattgatttttgggggttacaaataaattttagggagtagcaaattcacaaatatgagccttgaataatgaggattgactgtattttctgtcaagccaagtcaaaaaaactaagttctgtgttgtgacaaaattatttcataataagataaggtgactctgtgattctgtcagacccacaacttttaaaataatcacaatttagattgggctaaagggcaaaaacatttttcctaaaaatgtttgtttcagtaaaaacaacaaacaaaaaccatttagtccaaatttagctaacaccaaagaagatggtataaaatgagatcttagggtaggttttaatattaaagtgttactaattctcagtagtttacagtgtctttatagaagatttttgacttctaaatgagttaggttttattttattttatttttaatttttctgatattttgaggcctatgaagtaattaatttttctggctttgttttggtatattgcaaatatgtattttaaaaatttgataatgatattacaaacttaagtgggtatttagaaaaccacacatgtgatataattgaaaacaagtcaagccagggacagggtcttcttctcattgctagaatgtgaggctcccccatggagcgcaaggcatattgtatttggctgtgataaagtattgcttttgacatgtgctttcttgttaatcagagtattgatggtgcattggtgagccaagcaggaaagttttctctaaaaacaggaggctagatagtaaatatttcaggctttacagtccaaacgctgtctgtggcagctactcaactctgctgctgttgtatgaaagcagccatagccaagatgtaaatgaataaacgtggctttgttccaataaaactttattcatggacattgaaatctgaatttcatataattctcttgtatcacaaaatattcttctttctgttttctcccaccagtgaaaactataaaaaccatctttagcttgtgagcgatataaaaacaggtggtgggacagatttggccgtgggctgtagtttgccaactcttgtattaaacttgatgctgtcaaaactatgccgtatcagtcttcccaattgctatatttcttataaatctggatgtaaaaattttagaacctgtgtatctatacattaaaaggtgtgtgtgtgtgtgtgtatatatatgtatgtaaaggtattctatatacatatagtgtctcatacttgctagttaggcagtttggcaacatgaaaagagtccagacttggaagcaaaatagatctaggattagacccaaatctgtaactacttgtgtgaactcagaaaaattacttaacctttctaagtcatcttatccctgaaagggagctaatatgacctacctcacataattgatgggggaaaattagataatatatgcaaaggatacctgggacatggaagtatacaaataaatagttttttttgaattactaaattattctttttgaagaaaaacttggtacatggctccataagaaattcaaaccttctaatatagaatattttcaatatattttgttccgtttcataaaaatgaacatggcacatccccagatcaatttcttacacgtttcttttttccttttccaatggtactgttggtattctcatgttactctttcctctgacctcaatctttttcgacccggatgctggcattttcaaacattcctatgattcccactgggttctgcacacacttggtatacttcactagagcaatacctgtacttttcattagagtagttccttatttgacaaaaagagaaaaaagattatttttgcttttgaagccttataagggcactggctagagaggtgtacataatggaaaatttgccagatagccagagttcacaacagtggaaccttgaacagaattccaaaatctgtttataagaaacttgtttaagatgaccctcatcctttgagctgcatgttttttttttcttttttgataacggagtcttactctgtcgccaggctgcagtgcagtggcacaatcttggctcactgcaacctctgcctcccgagttcaagtgattctcttgcctcaggctcccgagtagctgggactacaggcgcccgccaacacgcccggctaatttttgtatttttagtagagacgggtttcaccatgttggccaggatgggctcratcccttgaccttgtgatccactcaccttggcctcccaaagtgctgggattacaggcatgaaccactgtgcctggcctgagctgcatgttttaatcctcttgtttgttagaaaaaaaacaaagggaaatctctcaatggttgggtgtttaaaataggtaatctcagactactgtatggcatctaaattcagataacttcatttagtcgtatttatttcacaataggaaactctccagtacagctcatacctactttataattgtggtatgtattgaaacagttgcatactaagttgtaaacttgatgaagcagctaataaaacttgtactcaagtcccttaacaagtttctaagaaagaactagaaaatggttttaataaacatagaagttgttgcttcaaacttgtgacacaaatgtatgacataagaaacttttgtttatatattatgtattaattttgtatgtatgtatgggtaggcatgcacacataaacgtatcaacaaagattgcttttctcctatcttgactctgcaattagctttaagtcagtgttggaacctgycaagtttgagaagtttactttttaaagtttctaattaaactcagagggggcaggaaacatatttgtaatcagctgctgtccttctttgcctcttgatattctagttggaagactgaggggagcaaataaaattgcagatagaagcttgtctctaattcttttttgtggccttgctgacaagtcatcttgctgggaaatatggggcgaattggcttgtttctgagactctctttgcctctagtccacagggatgaaggcagatagttgctgggaaatccatgagttgatactagcaggctgaagctctgtgctgggggttgtgtggctgtggcacaggttccctggcttgtttggaggggaggagtcatggttctgcgtcaggaaaggatcccattgctatgagctgtgtttattgaatctgtcatttggccattgctatcttgttctattctttcatcattcatgtttcttgttttttccctaactaaagcttactttttataaaactgtctgcattgcttagatcttccaaagcatgcggtagatattttataaatatttggactaaaaggctcagaatttcttagcgtaaaacttctgagtcatccattctgtgacgcgatggatgaaaaaacagatctagagaagtctagatggctcttccaggtctcagatcttctctgcctttttttttttttttttgtactctcctttgctttggtaagggtatgaccctgtatagctttaaacaaaacattatggattaaatttacacatacagatcaacttaaaagtagattcacacgagcacgtctcacatgtacactatgttctaaaaggtaatgcattctcttcaaagaataaggataattccatttttagtagaagcttcagacattgtagttgataaagcaaaataaaatttcaatatgaaagatagttttgatgaggaaagatttcttcagctgttctatccatgatatattccaagtgcttatcacagtgcctggcagagaggtggcactcagtagagccttgagttcattgaatgaatgaatgcatggatgaataagagagaagaaggaagagaggatggcaggtgggatgaaggaaggtctgatgaacatttctgcgtttggttttcaaaacacatttttctaaccacagcacccatgctcttgggtagctggtagtggtagcatcagcagccacccctcagctgtccctgcagtagccattgtatcagagcagcttgcaggttcctgcagtgccaactgtagctgtttcctgggaggcaggatgtgactgttattgaggggacctgttttgagggcctcaggaatgctttttcctttacttgctctcaatattcattttccttttgtactctcagttgtcttcttatagactttagtagtagacagataaattagcagggtcccattgcaggaatatccgtgcatatcttcctttctcttgtattgtcagtggaaactatttattaaacttacgaacaggatgaagttttatttcatttctggttttctgttgtgcctttcctctccgctgtgttatatgttattgtaatagtgttgtggcacagtgtcatctagtctagcaagagtttctgggatgtcttctgtccctgtactcttgagcttttccactctgggctctgctgattgctttctccagtttcacatccatcccatacacaaaataatgcaggcctaggatcaaagtttttgtttgagcaatgtgtagaagtgaaaacatcatatttggaatcagaaaaattgagtttaaagattgcatctacgatagactcgttgcatttatggacaattactttgtatctaaagatttcattttttttgaaacatgaaattcttgatttttcgtatgaactaatgagataatggaatgatatcttcctagtgtgtgtaacatatctgcttactaaatgttaacttataattacttttataaattgaaatttttatggaaatcattgtagagtcacatgcagtagtaagaaaaaagatattcttgagtacatgttatgccatttcccagaatgctaacattttacaacactgtagtacaattgccttctgtacaattgtacaaatatgtacaatttgttgtgtacaactttgttacctgaataggcttgtgtatcttccaccacagtgacgatgctaaacaattccaccaacacaaggagtggtggtgatgtccttttgtaagcaaacccatctccctcctgtctcatcttcctccattcctacccctggcaaccactaatttgtcctccatttctagaatcttaacattacaaaatgttacataaatggaatcatagagtacatgatcttcggggagtggtgtttttcactcaccatagctatcgggaagttcacccaagttgttaggtacatcattaatttgctcctttttattgctgagtagtatttaatacagtggatggaccacagtgtattatttacaagttgaaggacatctgggctgtttctgttgtttggctattatgtataaagcttctgtaaatatgatgtgcacagatttttatatgaatgaaagtttacatttctgtgggatgaatctccaagagtgcaatggttaggttgtattttaagacttaccatcatgagtcatggttccccggtgagatagtttcattctgtgtgtaaatggaggtcaaaataacattcatgtggatcttttaaatgatagcctgacaactgacacttttagtcaattaatcagattaagaaaattgataacccttttactggttctttctttctttccttttttttatttttttttattttgttgagactgagttttgctcttgttgcccaggctggagtgcaatggcacaatctcggctcactgcaacctccgcctcccagattcaagcgattctcctgtgtcagcctcctgagtagctgggattacaggcgtatgccaccacgtccacctaatttttgtatttttagtagagttggggtttcaccatattggccagctagtctcaaactcccgacctcaggtgatctgcctgcctcggcctcccaaagtgctgggtttataggcctgagccaccgcgcccagccctggttctttcttttttgccttaatttctctgaagtggctccaccatcttaaaaaactccgccattcttagaacctccaggcatgtaggccttttcctcttctcttgcttctccaattatcaaggaagagctaacgccctcttgattttgccactgtggacatttttatattattttcctcttgattcatagctttattgtctgattttcagttagcatattctcttcactgcattattaataggctatctttcctggtgtctctgtcctgaagtggagtcttctgcagcctggccacagctgacctttgtggcggtaggtcccaattctccccttgaaggccatggtcatgaccacctcagggccttcacatgtgcccaggactgagcctggtcctcttcacactgttagctccttctcatcctgtagctattggcacagatttcacctcctcatgggaggtcctccatgtgtatattcttatagtacactgcactcttctttcattacacttactgtattttttttcacttgtgtaaatcttactaccccacatggtccagtgtggtcagagagttactttcagaaccttcagaaaaggtttagatcacctaaagcaatctgaatcttaacgttgtctcttgagggaaaacaaccacaatccaaatgtgtgtatggcagtgggtttaacatacagtgcaaccttaaaagtcttctttagactttgtttcatgttcaggatctctcacaagctcaaccctggctttgggtggggaatcctttctatctgctgaaactgttggagaggtaaccccaaagcctcttctatcttggtgtccccatcttccacccaagcagcttacccaccaacaagttgccgtctgtgccaactcactatcctgtgagcttccttgcttttcctacagtgtatgtgtcatcccccgcaaccccatgaagtatcctttcactatgggttttctaagttggggttctgtctaacgcattcactacctattgacctccctgaagactggggtggggtcttgcctatctttgtagtctagaacctggaacattgactagcagatgttacgtacatgaatgaatgaattggtgaaagaataaacgaaattatgtgtcttatatataggagatacttggtaaaagyaagacaaaatgaataaataatgtaaatctttcttaattttccaggtgatttttgaagtgataacttctggacatcaaggctatctcgctatcgatgaggtgaaggtgttaggacatccatgtagtaagttgtctttatttgtaaatattcgggtacatcattgggggcatgtttacattatgaatgaagagaagggatgaaaacctgtgaagaggtcatcttgccaagacagttccctgacaggcctgtattgttggtttgccagcccagaaatccaaaagcatgtactttgtgtaaatgccatggtttgtataagtcttttaaaatttggttcaggaatggggaatcaaggaattctttggcatgctcagacatctttgcaaagaacctgtttatttgttgccgtggtctttagaattcgcttttcagtagtagcacaaagttaaatattgagaatctgtgcgttttgtttataagtccagtatgtttttggcacagttccttagtatttatcacatggtttcaggtgatatagctgcaaacaggcctgggatctgtcaaataaaagacacctacctaaaccacctggggaccccagaaatggcctgctcttcatcttttaaaaattaatactttaaaaaagtacaataggtgataaacatacaatttttaaaatttctactatgaacaactaacagtttgtcatatttgtatgtgaacctttttccttaaataaaatagtacaaattgctagatctgtttctccccaaaccctgccccccaggggccaccacagtggtgagctggttgttgcacctgttatggtttctagtctgcacacagcaacagactgtagctgcttgaagcagaaaaggcatcctgttgatagagaattggagggcagtggtattcctgagaacactagtggtctagactcagatgatgagcaggcccccaaagtgaggctacgcaagcagccacagcaaccactatggcaggggagccagctgcgaggacaaggggagctggcgctgtgtctctgtgcaccttacccttggaagatgacccttgcctagacattctgcgctgatttgggccttggcatctttggccttaggtgcaaagccctgagggggatagtcagggtgagcgagctagatcatgcactcattcatgcctggcaattggtgtcactaggaaagtgagttgttggcttttcccactctgtcaagggagctgggcctcaacttttactgagaaacatatagtgctgagcaactgaacaccgcaaatrtgtgtgtgtgtgtgtgtatgcgcatgtgtgtgctctttcccataatccccaagggtttataaaagcaaaaaagtaaggattgccttttataaatgctaatgaatggtttccagccatacaaatttctctgtattctttttttttttttaacttaagtgttagatattttaggtcaatccatggtattctatcatatggatttactacattctatttttctagtattttatgaacatttagtgtttcccacagtttttctctattaaatattgctgcagtgagcattatggatgtgcctactggtgcagtgttgagagcctcagtggagtgtgttcttagaggctgaattgctgggatgtagtgcagagacgttcttagttttattgggtgctgccaaaatgctatgaagtgtctgaaccagtttatattcccaccagcagtgcatggtagctttattttccctgtatctttgttcaaaattgatatcaccagacttcaaatttttggccatctgagggatgataacctgctttatttttaggatctctggcattaaagagaaactggctagttcatatatttcatgggtctttcctgatgaccctatgcaaaattatgaaagaatgattatatctacaataataaaaatggaaatatttgcaggagtggctcagctttttattgcatggatttgaatagaccaccaggaccctctttgttaagctttatagagaagacctgtgtggttgttacctgatgaatgtatcatgacacaggtgttttaattccatctaaaggggttttgctctctctgatatctttatttggtgctttgaagcttgccaaacattgaagttaacataaagcaatcatttgttcattacaaaggcagatgttacttttgtgtcatgttacatttgtcttttcttctgttgtcagcaaaactggggagttcaagaagattccctgtcccctcccatttcatgaaaagactggaaaaccatcaaggctgtacctaattgaaacagcagggtaaatttaggaagcagaatgcaattacctgagctggaactcagccaaatcctcagagtaatagcctccagctagaaaagtgccatgagatcttctaatatgcacaaagttcatggactctgattcacttcttactaggaggttaaaaacataagagctgtaattgcatgcctactaagtgctgagcactctaatgacatagtctgcctccctgtttcttagagcagagctcacggcaaggcagatgtactgggtgcaggtgtggtggctgcagtcaaggttgcacatggctttctattacatatcctgggctccatcttccacatctggccactagccagcataakagctcctgaagtgtagtgccttctattttactggattttagtcattgtgtgcagcaaagacctraagacttcatgcttatcagtgccttcctaaaacatgtctcaagcaattttgttcttcccataggagagagctttctgtagccatagaaatggtgtttatcttctctcctttggagaatacctgtgctaatacctaattggctttgggaactgctgtgagggcacagaattgcaaaacaggctctgtaccaaggtgatgtatggtacaacagcattgtgaactggaagccttaaatggttttgatgatagctcttccttagcttattttttcctgaatctctaagttaatgggggaagcatgcaaataaagattttaaagaaggcaatagtttgttcttaaaatgaaagctttacaggtaatattttatgagctttcttatcaggatttcataataatgaattattttgaaattttgatgttcattaaatttaaatcctaaaggagcattaatattttatatctaaaactatgctttccaaatggctgcaaaattgctgaatctcatttgctccactgtaaaggctcttgtttggattcatataggtttatgagtaagcattacaacattttttaatattagatattctgatacaagtatatagttgctcataaaattgactttagtgacaataagatgcaagatcagcctgaaatatggagatgactttgcaaaatcagcagctctctagcatatgaccacttctaataaacagataatttttgcatttgatatgcacactaaaaatatatttggaatttggttcaataatcctggtaagaaaagaagcattttattacaatagcttcctaatgttgcctcctgttcttaaatacattatgagctgtgcatatatgggtatttctcttattaccttctggtgctgataatgtatttttatgtcttaaaagccgtatgtaattttaatagatttattgacatatcactgacataatttatccatgtttaaagtgtacaattcagtagtttttagtttattcacagagtatgtacccgcgaccatagtcaaatttaaaatatcttcaacatcccccaaaagacccactacccattaatagtcattctttattttctcttgttactggtggagggtgtccaggttcttggtgtcttgaacaaagaattggacaaaacgcacaaacaaagcaaggaaagaatgaagcaacaaaagcagagatttattgaaaatgaaaaatacactccacagggtgggagctgcccgagcaagtggctcaagatccccatgactgaattttctggggtttaaaataccctctagaggtttcccattggttacttggtgtacaccctgtgtaagtgaagtagtggccgatggtcagtctgattggtcgtgggaggggaccattcagaggctgaagtgaagatacaaagttacaccctctgcaaacatctgattggttgcagaaagtgaccaatcagagactgaagtgaagttacaaagttatactcctataaaatgaaaacttagcccaagaccagcctgactggttgcaggaggggaccagtcagaggtactttcaatttttcatctgccacccagaaaaagttgggggaggcagtgtgcaaaggaagtagtctctggtccttttgtcacttgggtgtggaaagttgggattttcctttkgatttagttctaggaagtcagcatgattcggcctcaggttccttgcctctagaccctattctcccgacttactctggccaccactcctagccctaggcaaccattaatttacttgttgttcctgtagatttgcttgttctccatattcatttaaatgcagttgcgctatatgtggccctttgtgtctggcttccttcacttagcgtgtttcaaagttcatccatgttrtagtgtatatcaatatttcactccttcttaaaaccaaatagtattttattccatggatataccacattttatgtaagcatgcatcagttgatggacattcaggttgtttcacctttgggctattgggaataatgctgctgtgaacatttgttatcagttctcttgggtatcatgctctcagacatatacttaggagcagaattgctgggtagcatttgaagaactgtgaaattgttttttaaattggctgcaccattttccatttcaaacagcagtgtatgatttcaatttcttcatattcttgcaaatatttatgtctttaaaaaaatcatagccatccttgtgggtttcaggtggcacctgtttgtagtttggattacctaatgactaatgatgttgagcatctttccatgtgccatttatatgtatgtttgggagaaatgtctattcagatcctttccccatttttaattgagttgtttatctttttattattcagttataagaggttttatatatctacatacaaattccttatcagacatatgattcaaaaacatttacccccaatctgtgagttgttttctcattttcttgatggcatccttaacagcacaaagatttaaattttgataaagtccaattttctgttttttctttcatcacttagatacaaaactatttggagttgtagctaataattcttctaagatcacaaagcttttctgtgttttttccagagttttatggtttcaattttttttttttttttttttttttgagatggagtctctctttctcacccaggctggagtgcagtgctgtgatctcggctcactgcaacctccgcctcccacgtttaagtgattctcctgcctcagcctcctgagtagctgtgattacaggtgtctgccaccaagcccagctaattttgtatttttagtagagacgcggtttcaccaatttggccaggctggtctccaactcttgacctcaggtgttctgcctgcctcagcctcccaaagtgctgggattacaggcataagccactgtgcccgtcctatagtttcaattcttacttacaggtctatgagctatttgagttaatatttgtgtatgctgtaagaaagtggtgaaaattcattcttttgcatatggatatgcagttattccagcaccacttgttgacacactgttctttccccattaaattgccttggtacccttgttgaaaattaattaataaatataaagacatttctggaccctcagttctattcagttgatctacatgactattctgctacaagtatgatactattttgattactgtaactttttagtaaattttgaaatttggatcagtgggtcttccaagtttgttcttttctcattattgttttggctattctgaatcctttgtactttcttttctttttgagacagagtctcactctgttgcccaggctggagtgcagtggcactatctcggctcactgcaagctccgcctaccgggttcatgccattctcctgcctcagcctctcgagtagttgggactacaggcacccgccaccacgcccggctaattttttttttttttgtatttttagtagagatggcgtttcacagtgttagccaggatggtctcgatctcgtgacctcgtgatccgcccgcctcagcctcccaaagtgctgggattacaggcatgagccactgcgcccagccaatcccttgtactttcaaatgaatttgagaatcagcttatcaatttcagccaaaaaaattcagctgggatattgatagggattgtgttgaatctgtagactggtttgggtgaggggttattgctatcttaacattatcaggctttgtgatctgtgaatgtgggatgtctttccttttattgaagtcttttaaaatttcctttaatagtgtttgtggttttcagagtacaagttctgttcttcatttgttaaatttattcctaagtattttattttgaagttgttttaagtagaattgttttcttaattttatttttcgattgttcatttctcgcttgtagaaatgcagttgattttgtttattgatcttgtatcccgagatcttgatgaacttgcttattagctctaattggttttttggtggatccataggattttctgtatgcaaaattgtgtcatcttcaagtaggttttccagattcctctttttccaacccaggtgaattttattatttttcttgctagtttgccatggctaaaacctccagtacaatgttgaatagaagcaaaaagaacagaactgcttgtcttgttcctcatcttaggaggaaagctttcagtcttttagcatgatgttggctgtggtgttttgtaaatgcttgtttttaggaagaaagttcctttttcttcctagtttgttggatgtttttatcaagaaatgctgttgggttttagcaaatcctttttctctatcagattattatgtggtttccatcctatattctggcatattatattgattgattttgggatgttaaaacaacctagcagtcctggaacacatctcacttaggcatggtgtataatcttttttaatatgttggcatgtagtaatgaaacattatacgaagttactgggatatatgatgccttcaattctgaaatcttaaaattatacagaatcatgccccattattttgatgccaatttaaaaacaaaataatacagtaaaaaagagataaagcccttctaaacccatgtgctgtatattggataaattgaatacaaaatccaagactgtcctgtattattacttgggcaatagaaaataagtcagcaatttctttaaatattaaagtttataatatggcctcctaaattcaaaattattcttattttttaaaatagtattttccttattaatttgtgtagtcacacattgcttaccactcccaaatttakattttttaatgaagatttattaaatagtgtgaytgaaataagaataacagtgacaaagcacaaattagaattgttttcggaattatgttctgctgaataaagacagattcatgtgctttggttgagagatgtgtgggactcagaattgacctttcattttaaacatgtgggaacacaatttggacttttctctaaaggaatatcattcttcttaagatagagtcgacttctaaaagttatttatatgtagtggctaccttagttttctctgataagaatgttgaatctgtttttccacttgaaaaattattycattaaagcctattcttacctttcaaggaaaacaaaactgactttgacctgaaacatgttaagagaaattttctgcttctatcacaggaattacttggctttttttggacctataatctcatttgtataagaagaaaataataatgtttttctcactgagtaaatatagggattacattagttaatgtacatatagaatttatcacaatgcttaccacattctaagaatttaattaatgttaactattattattattaggcactacattgtgatagacttgctagaattagttagctgctaatggtaaacctctaaatagctaaaatgattgatatgctagatggggaagtttaattgtatgtccatcgttaaattccaaaaatgtttgcaaaatatattggttctcagcgttagagtaagcagtaccaggctgttctttttggcagcaatttgcttccttgtttgtgatgatatgttacacaaatagagagaaatattaactatttttattctggtggttgggcatgcatcccgtacatttcaacctatgccattacattaaaatgtaagttaaagcaaaagggggttaggacatagtcctcttgttccacttcagtttgcactttgatctcacaaattactcttctctgattttgttgctagtatttgtatgcagactctgaagaatcaataataatgaaacatctacaaaacgatttgtatcttggtcaatgataattcttggctttgggatcaaaggcttatttgagatcaattaatacacgaaaacctctattctttcttagtaagaagaaacagaatatggaagcgatgagaggataggagggttgtactaagaacatgtttgttattcatggaagatatttagtttttaaatctcctacaggttttagaagaaagctggcatagcattttgaaagggtatccaggagacaagtgggcctgtaaatttggagagagagagagaatgtttctttttgaatatgagatagattgaaatttctgttctaaaggtggtatacacctgatgttacaattaaagtagtatggcaagattcagagcatacagctcagcatgggatctacacttttctggccatagagctctttttcttgggctcttttccaggttccagtgatagatcagttattttaaatagtaaggaacatttttgtgggctaagtatgaggcacagagaacaccttggcttcatcaacttgtttattctttatatcaacactgcgaaataggtacttttaaaaaatctctattttacaaataaaaaaattttgtgaagatttaggtttaagaatttttgcatatattcggagataataraggactgaaggaagtactgatgcttgaacacaaatgtgctgaaatccaaatcttaaaatagtatcagcctaagctgcttgccacctgaaaatggttgtaggatttatagcactaaacaaggggaatctaggcatcttaaaagcttggaagattatataagcctttaatatttactgaaaaaatttacaccattagcagaaagtttgactttcatgttcttggagaaatctgatctcacagtcatttkgttaagtgaaataacttagaaacagaaaaacaaaaactacacgttttcacttacaagtgggagctaaacagtgtgtatatatggacataaaagaataatagacattggagaccctgaaaggtgggacggggaaagaggtgagtgatgagaaattacctatggtgaataatgtacacaattcaggtgatgggtacactaaaaatccagacttcattgctatgcagtatatccaaggaacaaaactgcacttggatcccttaaatccattaagatacaaaactttaaaagaaagtgatattccaaaactgggcgtaccatagatgaacacacctttagcagaaccagcgacaattctcatattcacattatttttttaactcttataacgtttgctgatagagtgtatgcattttataactttctcaagaaagattatagaagttagtacttattgtattttttagaataaacagcagaaatatacttcttacagttctggagcctggaagtctgagatcagggtgccaacacggtcaggttatggtgaggaccctcttctgggttgcagacttccatcttttttgttgtgtcctcacatggcagacagagggggaaagagctgagtccttttcttttttwaaaaaaatgttattttattttaaataataaaaacaaaaaataaatcgacacataattgtacatacctatgaggtatagagtgatattttgaaacatgtatacaatgtataatgatcaagtcaggattaattagcttatcacctcaaacatttatcatttttttgtgctgggaacattccatatcctctcttctattaataggtatttgcaaatataccagaaattattgttaattatagtcaccctacagtactgtaaaacactgtaactttattaatacttatatctaactgtaattttgttttcattagccaacatgttgtccctctacgccctacctttcctatcccttagtaaccactcttgacttctgagatcaactttatgatctctcttayatgagtgagaatgtggtatttgtccttctgtgcctggcttttatcacttaacatcatgtatgtactctaggcacatccatgctgcagcaaatgacaaggtacttttgaaaaggtggtgaaaaagctccttcataccctgatggtaaaaatgtgaattgttataagcttttatggaaagcagtttgacaatttatgtcaaatgtcttttaaaatgtgtgttttaaaaattatctttggccaggtgcggtggctcacgcctgtaatcccagcactttgggaggccaaggcaggcggatcacgaggtcaggagatcgtgaccatcctggctaacatagtgaaaccccatctctactaaaaatacaaaaaacaattagccaggcgtggtggcaggcgcctgtagtcccagctactcaggaggctgaggcaggagaatggcgtgaacctgggaggcggaggttgcagtgagcccagctcgcgccactgtactccagcctgggcgacagagtgagactctgtctaaaaaaawatatacttttttattgatacataatataagtgcatatttgggggtacatgtgataatttaatacatgtatacaatttgtaaaaatggaagcagtgtaactgggatatccatcaccttaactattgtctttatgctagaaaaatttgaattgttactatcttctagatattttgaaatatacagtagattttgcaaactgtggtcaccctgttgatcttcaagcactaagttttatttctaataagtgtatatttgtacccattaatcaactgctcttaattctgcacccccactccccctatccatcccagcctttggtaaccattaatctactctctatcttcatgagatccactattttagctccaacataagagtgagaatatgttctatttgtttttctgtgcttggcttatttcacttaacataaggccttccagtaccatccttgttgctgcaaatgacaggatttcatgcttttttgtggctgaataatattccataatgtaatatgagatattgtgttcttgtgtgtttgtgtgtgtgtgtgtgtgtgtgtgtgkatgtgtattacattttctttatttacttatttattgatggacacttaggatgactccatattttggcaattatgaatagtgctgcaataaacataggagtgcagatatctttttgatatattgatttcctttcttttggatatataccaagtagtggaattgctggatcttatggtagttctatgtttagtttttgagaaacctcaatgcagtttttcataggggctgtactaatttatattcccaccaacactgtacaagggttcccctttctccacatgctcaccagtatccgttactccctgtcattttgataaaagccatcataagtggagtaatgtgatagctcatttttgttttgacttgcatttctctgatgattagtgaggttgaacattttttttcctgtacctgttggcaattttcatgtcttatgagaaaattaattagaggctcttacttaacaacagaatgggtcaagcagaggaaagaatcagtgaatctgaagacagctacttgaatgtccagttttaaattggactatttgtatttttgcttgagttatttgagcttcttgtatattctgatgattagtcctctgtcaaatggatagtttgcaagtattttctcccattccatgggctcccttcactttgttgattgtttcctttgctgtgtagaagstttttagcttaatgtagtcccatttgtctgtttttgttttggttgctcttgaggtcttacacaaaaattctttgcccagaccaatgttctggaatgtttcaccagtgttttcttttagtagtttcatagcttcaggtcctagatttaaatctttgggtctattttgatttgacttctgtagatgtcgaaacagaggaggctagtttcctttttctgcatattgttctcctgttttcccagcagcagttattgaagagactgtcctttcttcgttgtatactcttagcacctttgtcaaagacaagttggctacaaatgcgtagatttattactgggttctctgttctgttgcattgatctatgtgtctgtttttatgctggtaccatgctgttttggttactaaagctttatactacattttgaaatcargtagtatatgatgcctccagcttttttctttttgctcaggcttgctttggctatttggaatattttctggttccayataaattttagcattatattttctatttctgttaagaatggcattgatattttgatagggattccattgaatttgtaatttttgagtagtattgtcattttaaaaattattgaaacaaatcataacagaaatacaacatacctaaacctatgggattttcctcttaatttcttcgattggttgttcactagcatgtttttaaatttccacgtrtttgcrtatttactgaggttccttttgttactgatttctagttttattccattgaggtcagaaaagatacttcatattatttctacttttttaaatttgttgagacctgttttctggcctaagatatgttctgttctggataattttgtatgtactaatgaaaagaaagtgtattccatagcatttgggtgaaatgttctrtagacgtcagttatgactattwggtgtagcgtgtagtttaactttaatgtttctttgttgactttctgtctgaatgattggtctgttgatgttccctgctatgactgtattacagtttatctctctctttagatctatgtttgctttatatacttgggagctctggtgttgggtgtataatatttataattgttttatcctcttaaccaatccctttatcattatataattaccatttttgtttttacagtctttgatttgcaccctattttatctgaaataaacatagatactcctcctctttttttgttttccagttagatggagtatctttttctacccacttcactttgtcttacctatgtgagtgcctttatagttgaggtggatttcttgtaggaagaatttaattgtgtcttggttttttatatgttcagcctctctatgccttttaattggataatttgctccatttacattcaatgtcattattaagtaaagacttactactgccattttgttgcttaatttctggttgttttgtagctcttctctttcttcctttcttactactttgtagttaaatgattttctctggtcacgtgttttaatttgttgtttttcatatgtaatgaatctattataggtttttgcattgttgttacaattaggcttataaaacatatcttatagatataagttatcttaaagagatgacaacttatctttgatgacaaataaaaggacagaaaaatgaaaaaaatgcttttatgctttaactccatccccctcacattttgaatttatgttgtttcagtttgcgtgtttttatacggcctatctcttaacaggttaccatacctattactgtttttgatagatttgtcttttgggcttcacaatacttacgaatagattgcacaccacagctgcagtgttagaatattctggatttgtctgtatattaatattatccgtgggttttatatacttttacatgttttcttgttgcacattagtgtttttttcctttcagattgaagaattccctttagcctttcttgtaagatagatctaatagtgatgaattttctcaacttttgtttgtctgggaaagactttatctgacctttatttttctgtggatagctttagtggctgcagtattcttggatggcaatttaaaaaaaatttccacactttgaaaatgtcttcttatacactcctgttttcattgagttctgttgccatatgaaccctgattcctttatatgttatttgcttcttttctcttgctacttttaggatactctctttgtctttgacctttgagagtctaatcattatatcttttggggtagccttatttgagttgaatctgtttggtgttctctgaactttctgtccctggatatttatctctttcatgttttggaaagttttctgtaataggtaagctttttgccccttgctgttgctcaactacctcttgagcaccaataattcttaaatttgatattttgaggtatttttcagtattttgtagataatctttttccttttcatttttttctttttgcctctctggctgtaaattttcaaatagctgtcttcaaattcactgattgtttcctctgcttgacccattctgttgttaagagcctctaatgaatttttttttttttttttgagacagagtcttgctctgtcgcccaggctggagtgcagtggcgcaaccttggctcactgcaagctttgcctcccgggtacatgccattctcctgcctcagcctcctgagtagccgggactacaggcgcctgccaccacgcccatctaattttttgtatttttaatagagacagggtttcactgtgttagccaggatggtctctaactcctggcctcatgatctgccctcctcggcctctcaaagtgctgggattacaggcgtgagccaccgcacccggcctctaatgaattttttaattcagcaaatgtatttcttagtttcaagatttctgtttttttttgtttgtttgtttctctgataagtttctgaattgcttttctgtggcttcttagagatcagtgaatttccttaaaatggctattttgagtttttggttataaagtttacatatcaccatcttgttcaagtcagtcactggttccttgctttgtccatttgtagaagctgtggttcctcatttgtttttgtttcttgtggatgtatgtctatgtctttgcattgaagggttggttatttattccagtcttcccagtctggcttgttttgttttttattggacatttttgcttagagcttctttgtaatttacctgttgatttccctttttttcctctgctaggttactgcctaatttttggcactagatgacaccttaagccaaagtttgcctcagttatggtaaacaatgagagtgctactttccctgaatttgagaggtcccaaaagggatataccagtagtgtgggaaggctggctaagggtttgtgcagaaaggatgaacaattctcctacagtgaggtgctgcttaacagccactctgatttggcatccctttggccaagttacagagaaagtttctaatgctggggtggcagtcctgctgccccgtacctttttctctgtccttagggatatttctcccttcaggcactttcgatgtttccattgggttggggaagggacagatttcctgccaggcaatccacaatagtggggaaattgtttacccactttgacctcattttttccaatgtagaaattatgagtcagaggaaattttccggttactttctgctgggcagattgggggttggggtttcacagatattgaagtctggttttcttccctctgctcagaaatttttcatgtctctggcycctggaatagtctcatcctcatatttgagttcttgggtattgctggtgataatctctgtgctgtatatttatttattttttgtgggagtgagtgaagccaacttgcttctatgccaccatttcagaactggcaaaaatgcatgtattttttaattagtaatttctaatagtttaacttataaaaaaaaggttttaattatgaaaacttttatcttagcattatatgtagtggaaacaaacctcagtgttcaataatgggggatgtttccgtaaacttgtttatgtatgatatgtattagggtttcttaaccttgrtgctattgagattttggcacccgctaattttttgttgtgggggctatcctgcacattttagcagtgtctctagcctctgctttctgggtgccaatagcactgccttttagtagcataattctgctgcgagacaccaggagtcattactgaaaatatttaacaacccttcagcacaggctcagaactgaccagcttaactgagcggggtaaaatttagaatagtggccgcaagtgcaatacccctttaacccaagttatcctgagaaatggctacatacccagacaccttgtgttagagacctagcttgctgtagtaacctgtagctgggggagagcaggattaggtgtctgggaaatccactggagagaccagcaccagggagagaacctgttgttctgagtgtgccagataacttcagcctttaacactccacagggagatggaaggcggcgggggttggtcaacatgtggaatgaggcttcaaggcattgtcctgagatattattggaaggaaaacttttccttttctgatttgggtccagtggttggggacctgcagattaactgacaagagacagattaattgaagaaaagacaaagtttattttcacaggacagagttcccagcaatggaaaacccactaaataaccagagataaaggtttatattccaaatttaacaaaagattggggagtggttttagggcttcagtgggaaaatgtagaaagttctatcaggctttttgatggtaatggcaacaggcagtttgtctacctgggagctgaattagacaactcccttacaggggagttaatggcaactattttttctgggaaagctctgttttagtcaactacttgaagttcagataagatttctttctgcatcttcttttgctcaaatgttttcrctttaaaataatctgtataccaactctggggatctgaatgggtccccgtattttccctatgtagaagttccttcaaaaaaagaaagtgggttgattgctgcgcagagacatttgtgttataaattgcaaggtaagagatctataaaagagagcgaatttagattagaacaaggaaacaaaaagaaaccaaagaataatggttggagcaaactataaactcagattctgagtccagaaggcagccagttgtgatttccgggtgttggatttgaagcgtcttcagtgatgatagtagtgtcacagccacggttactccctggagcagaatgtggaagaggcaggtattccagtgggctttctgagtggcccacacagtggtggtgattaatcttttgaagttttatcaagtcatccagcttcagcttgcacagctttgggagtatgcttagaattatttcattggggaattttttttaatgtttccagttaatgacacatgtactaaaatagatttattagaagaaatttgtttaaatttccttgacaagaaacagcttttggcttctaatatattcctattaattgagttaaatcttaaaattcttagtgaactctattcatgttggggacttgtggtgtaggtaaacctaaaattataatgattataaagttttttatatggtaacatttcattagtatcagatgagagtgagagagtagaattctacagaaattgaaatctaaaatgaacagtctttaaggataggtgtgtggttttaataattgtaagtaatatgaatttaatgatgataatgagtatmtggtgtgtgtgaggcaataacatcaagttctgttgcatcaagtgctgtggccgttgtgatatgagaaggcctaaccacaaggtgagcgaatctacagaagcttcatggaaggaacagcatttgagaaatgccttgaaaattcccgcaggcagacccaggggagccactgcaagtgggatgaagagataaggaaaggcacagatggtgggaagactggggagaggcactgtggcttcgtaaaccgagcctggtgtttggaactggatatactggagtttgttctttttcttacacttactagccaagtacccataagtgttccccatcttggaaatggagaaaatatctccctcacagaacatttgtgagtactcaatggaaaagtttctggcacataagtacccaataaaggttaccttgttccattttctaaaaacaatgggtctttgactttttcaggaacaaagactaaaagagaaattcatttagggactttttacagagatcttttaaaaacacataattatgttattcttgagcaaggggtaatttgattaagtcagtgaaaagcagagatcatagagttgtatgttaatatattagtattaagaaacaatggtccatggttatattgctttgttggaagttatttagaacattttgcatgctgagcatcatgaatactttgtctgaattattagtggcctccaaattaataatggggctttcctgtgtgtttttgacattaaattaagtttttctttgttctttgttctgaagtagtaactcaacttccattcctaattacgttctgcccaggctaatatgagcactagtttgtaatcttttgctacccagtagtggggcacccttttttgaagctgcctagacatggctaaagacacatttgcagtggggaaaagctggcaaggcgtgacagatgcattctggttattatccagatttatctgtctctcccagaaagtatgatcatcccctttgcttcccacctcttctgtgggaagcactctgctgtgcccacccttcccgctttgttactctttcactctatcattgttataataaggaaatgttttcctaaaagtagaattttcataaaatttaagtcctgacttaccgtcctggttcctggacacctgttttcagtgtgatgcagaaattggcctgtgcttctcataccaaatagaataatcctttatttaaacagctgtcccatatggacaatgtacattacgagacaatggtgttcaccatttggaatccttctttgttcttgaattagaaataagaatcagcaaacattgccatgctatggcagtctcagcatcatttcacagagtgtgtctaaaggagtagtatttttggtagctgaaaaatattacataagtaatgctgcataccagttagttgtattaaaatatatattatgtacagctgtgtacttggcttgaaaagcttccttgacaacatcatttaacttcttactgttcttttcatgttgctggtataaatatctaatatgtttttgttcaaaacatcaattaggtttcagtataatctttattaatacagatctgttattacaagaagactgccgagctatgataatttgcacagcaggaacaataaaatatctcctttctgtttcattctattccagaatgcttggctttttgttattcttttacacaacatactaaaaccttttatgattttttwaaaattatagttaaatctttaaagcttatataagcaaaagcattatttttttcccaaggtgaacaaaattgaaaggccaaaaatttcagatagattgaagaagacatatattagttacaaatctccacttttaatatctttcattctttttctttatgtagccaggactcctcacttcctgcggattcagaatgtggaagttaatgctggccagtttgctaccttccagtgcagtgccatcggcaggaccgtggcaggagacaggctctggttacaggtacagtaactcattttcatcagttgatgagagtccagcgggaagaatacactccccctggaggaggaacccagagaaacagactcaggtcctagtgtaagagtttccttctttgttaataagtagccagattacttagtaatctataaaagctaattatttttgtttaaacaccttttgtgaatttcttttttttttcctttgcttatgcttagtcatcttgcttggaagatctgattgtcaaattacttatatggcagtttattaaattacaaaatatagcactcttctcctaagtcttcctcttgagaaaaatctaaagagtctctttctctctctctctctctcttacacacatacacaccacagaacacttcataggcctttttgtcatttgaatttccaagctgtaagcttaaacttagaaattaataatacatattttacttttgagcttttaaattatatttctttggtgtagtgatcaattgtgtgacttgttttgtaattattcaaattccaccatatgtgttttgcatggcagagggttgcgtggatacatccatgctctcaggaatcctgacagaatgagtgggagtaaattgcctgtcccttctaaccagaatgccacccacttctttaagctctargtttggggtttsccctgccttggtattctccagttgcattcttgtttctttcttttaagcattaatctggaggctgctcatttttcatcttgagtggtgttgattttttgtccttatctttccgtgttttgtgtgggtgtgggtttttttttttaaagtattatctatttatttttagtttgctactgagttgaactgtccttcgggttttaacccttctgtgtacgcggttgtgctccacactggcttccgctccatcatgtgtgctggccttgtctctgcacgtgccatctctccacctcctgtcatgcctcgcagtgtaattatgattgtgattggagactccgtgtgacactctgtaatttttaaatccttcattccttttaatcactgcaatgtaaatctgtagtcatttgttttgttttgtgtttgtcttagagacagggtttctctctgttgcccaggatgcggtagagtggtaccatctcactcaacctcctgggatcaagtgatcctcctgcctcagcctcccaagtagctggtacaacaggcacatgccaccatgcttgagtaattattttgtcatttttatagggatggattctcccttgttgcccagtctggtctcaaactcctagcctcaagtgatcctcctgccttggcctcctaaagtgctgggattacaggtgtgagccactgcacccagcccagtagtatttttattcttctctttctggggaaaatgggagacatttgagtgtatgtcccaagattaatcagcaatgcattgtcagatgggaaatgcattctggagaggcttcttgttgttttctctgccaggatgttccacccctctgcccagtgtcactctgttttttcataccctactgtcccttttagagactttgctggccaggaagtgtatgcagaggattatattgtatattccaagttcatctttactttcttctttgtctgtaaaagttttgtaactgctaacttaagagttttttgccgcttgtgaaaactgtcctccgtattcaaattttttttctctttttaacctacatcccaattgttttaaactcttgatgttaaaattcagaattgttttctcagataatggctatttggtattaaacacaatcaagattggccatctgtggtaattaatgatgagacaaacatcttctattgacattttccacagagtattaagcaccttttaaaaatgaaactatttgttcctttgatttatctctagaaatcttaattatttgtggaaaaatacgttttgctcctaatatttatgatattacttgagagaatacaatataaatactatattaagtctagagaatacaatataaatactatattaagtctaagctctcgccttaacagagtcatcttagatattcccaagaatttaaggtttgttgaggacatgatttgctctttttatttttgcaaacgtcctggacttggtgtgctcctgcttaaacttgagcacttatttgggttgggaatctttcactacttcctacacttccaggaactttgttttagagataatttgtcatgtggtatggagaaagctacttacagttttggggtttgaaaaacaaagggtctaaatgcaaagttatcagccctgactctactatagaacaacttggaagggttttgttttgttttggtttgttttttttcacaaatgtcttgtctatttccagattctcatttagttggtctagggtggggcccagcgtgcaatgttttattaaagactctccaagtgattccagtgtgcacccagggttggaaattactagtgtgaagcaaaatacaacacacattctaaatcaggaaagaaagaaggcagacataacatataactggtacctgtattcagttgcctcagtttgaccccaacgtttaattttccatgtactgatctttgaattttttctcattagatttgaatgatggtgttggtagttgttttcacagtcggtcccttaatgcctttctttttctcttgctgagtcttttctgacccctcttgtcttcagtgaccatttattgccctgcagctttctacactgcgctgtcaagaaggagatgacacagatagaactgttgtgactttgagctttttactgaaacttactttatcctggaatcaggacactatttggttagtgaatctttgtgatgttagaataattttactgttaaatagtttattttccctggttgggtaggcattttgtggggaaatatttattttattaatagcttatgaaataagacccgtgtccttcacctgcaagggtggtttttattaatctatatgtgtacaaagcagtttccagtagtgatgaaggttttcagcagatgctggttttgcacagcccttcctgccctcttgcccaggacccctcactcccccttgaacattttctcagkccattctttagaggtcgtgaagacatgtaaacctttcgtcatggaccaggtctttctaatctagagttgtaatacactaacacctgtctgcgtgtaaactcatttgggtcctcaaaataatcctgagatccaggcagaaaattgaagaaaagaacttatttttagttttttctgtgattcgaatctctctcaagagtgagtcaatatttagaaattaataatacatctttgtttgggggtacattggtgtttttgaatataatcatttacaatatttttttgagacagggtctcactctgtcacctaggctggagtgcagtggcatgatctcggctcactgcagcctcgaccacctgggcttagatgatcctcccacctcagcctcctgggtagctgggactacaggtgtgcaccaccacacctggctaattttttgtattttttgtagaaacaggttttcaccatgttgcctaggctggtctcaaactcatgggctcaagcaatccacctgcctcagcctcccaaagtgctaggattacagacgtgagccaccatgcccgacctatttacaataatttttactacttgtgttgcagtcttttgaggcccacaataggtattctgcacaaagtttcatggttgtatcccatggtagtttatctgttttgtaggagaggagttggaagtttaggattgtcctgggtcacaaagaaaaatgacatagctggcaataatacaactctgtttatttacttttatttcacctttaagtaattccactctactataccgtcttgttgaatttggaaggtagatgaataggcattatgcacttacgctttgatagaagaatttgggtgtgaccaatattacatcgttaatatcaaggtgccatcctgaccgtggaaaataatgcttatatgtattacatgtcatattgatccatacctgtgaaaatggccaaggttttgatttttttaaatatagattaaatataacccttgtcagagtctttcacaataacgtaacgtaaataaatctgatgatgacactaatgaagaaatgtttatgattaacagatgtgtcccatctgtttatattttcttagtctcatctgtggaccacacaggttatgttgccaagtgggattgttttctctagaacactgaacaatagaataagacccagtgtgtgagcgcatccattgttacagctacaaaatactttaaaaaattttccagacagtaggaagacaacatctgtagaactcttttcttgtatcgaaaaacctatatgcaatgcagttcttgaagatacttgtgatatgttatcggatatggcaatctattcatataaacatggactgcaacagtgtgagatactaaaattaagtgtatttatggaaatcattcaagcacccaaaatattactgtaatttttgctatcaactttccgatcactttttgagcccacattttgaaaatatctcagagtctgtatacatatactgtgtgtatgtgtgtgtatatatatataacactgaaaagagaaaatggaatttgagattttctttttatactttctgtacacttttatacttttgaaagtactttcttggctgggtgcagtggctcacgcctgtaatcccagcactttgagagggcgaggtgggtggatcatgagatcagatcgagaccatcctggccaacactgtgaaaccctgtctctactgaaaatacaaaatttagctgggtgtggtggcacgtgcctgtagttccagctactcaggaggctgaggcaggagaatcacttgaacccggaaggcggaggttgcagtgagccgaggtcgtgccactgcactccgtctcaaaaaaaataaataaaaataaataaataatttttgtttgctgatgggaaacttctgatgttgtatattttttatgtagtcactgacctttaagctatgtatggttgtattaaaacctttattgttctttcttcagtattccaaatattatttgcctatatttgcttgtttctctcaggactttctatttataatactttccagtaaatgaaggtgacaaccaaagctagctagtgtttatgtacctatagatgactcatgcacgtgcagttacaagacctgtggcatgggggccactgcctttctcttcccctgcctggggtcccattttggtgtttttgtaacttctgctctttaattcatttcttgtaatcgttgtagaggttcctgcattccttactcctgttagcaaccacatcacattcagagtgggtgggaaatacaaaggttctgcctccaggacaaagagcagaagacggaggtggggaggagcgatgtcttttcaacaaaggatgaacagatctttgatcaggctaggggttgaggtgtgcatgttgagtgaatagcagttggcagtggaaacctggaaaataacccctttctcttcacagtcattagaggtccataccatttttaaatatcttactttttaaaattacacaattatgtaacctctgaatttggagcaatcttcaaattaaattcctaattttattgacgagaaaacagaagcccagaaaatgtaggaaactttagtgcagctgtatatcctgtttttatgtttattataggtaactccattttattattgaaagtcagttttatatgtctaatatttttatgtctgtatatatatgtacatgtttatacttacgtataagtattgttatttatttacaaatgcatgaattttttctcttggacatttttcttcactgagtgatcttgcatctcaaatattagccttttaacctgatagtctcagatttactgtgatttacctgtgttaaatttagaaccttaaaatccatcatagcacaatataattgagagttttactgttttgcaagcagagtttggcatttattataagtaatgcaccagaatagccttttaaaatgattccataatatgcwttagtttatacaaatagaaaaggaaatcagatgatgttactgtaaagtacagtagtcccctcttatccgagattttcacgttccatggtttctgttacctgtggtcgatgaaaatgtggtccgaaaatgtcaaatggaaaattccaggaataaacaattcataagttttaaattgtgcaccattctgaggagcacaatgaaaagttattctggcccaccctgtcccactgaggacatgaatcatccctttgtccaacaaatcccaccacctacccagtagttactaaggaggtgtcttggttatcagataggctgtctcaggatcacagtgcttatgtttaagtcacccttactttacttaaccattgccccaaagcacaggagtagtgatgatggcaatttggatatggccaaagagaaggcataaagtgtgcttccttcaagtgaaaaggtgaaagtgctcaacctaataaggaaagaaaaaaattgtatgcactgcttgctaagatctacagtaagaaagaatcttctatacttcaaattgtgaagaaggaaaaagaaattcattctagttttgctgttgtacctcacactgcaaaagtttacagccacagtgcatggtaagtgcttagttaagatatacaaggaggcattaagtttgtgtgtgcaagacatgacagaagctatccatggtttcaggcatccactaggtgtcttgaaatgtatctcccatggaacaggggggactgctatactgttaaaaacactggtacaaccgagcacctagactagtgcttgtcacatagcaaaatgctcagtgaatacctactaatgcatggggcttactggctacccaaacaaatcgtgtagctccttcaggtgagcatcaaaagtagatttgtagttagagcaggaaaacaagcacagaggaaatcgtttctctctgggatgattgctttaggcctgcagttcctgttcagaggatggtctttgatgagaggagcaattcatagaatgtagtggtgcctctgctgcttcaggctatatagcaaatatcatgcagagttacaaaaactgattaataaaaacaggcatatgttggagtaattttagaagcaaatatggtcaatatatcatctttcctaaatcttcatttcttgtaccctttgcctaggttttcttattctgtcatraaacttctgtcctaattcttcctgtaaaaactttcttgccgtggcatccacattaaacgttatagacatacacctttatttttttccatgatccccatgaacataagaaatatacctttaataaggatattccacttgagtttgcacaatggcaacacctgtgtcatagtaatagatgaattaaacctacsccatccaccttttgtaaagaatgtaattccatttgagctcttcctttgaggagtttaattttcttaaaaaaacttacttagagttaacagtttttcagctgttggcctagagattgatatattttttttcttttgagagtttgacatataattccaccaagctgggtatgagctacgcaatcgtgaaaaaagtatgtttctccagtctaataaattgctcacattttgtttttgagctcagataattttaaaactttttctgagagaaaagagggaaaccttgagatttttataacctacaacgattttaatgggaacagtttcactgatctaccatagaatttggcttttgaatgaataaattaaaaattatatgaatagtgtttatattactgacttcagcaggtgtgtttgaaataaagtaattgcagctacatttactgaacactgctatgtgctagttactctggtaggtgatgttcaggcatttttttcattgatccctacaagaattttattatacgtccatttatagaagaagcggctgaggcttcttctttaatgacttttccaatggtgcattgctaatcacaagagctcggatttgaacccaggccgtctatgttgtatcgtaaccataatgcatgtttggtactgcagaaaaagacatagatagttcctcatgaattcataagtatcatgtaatttaaatgatagcattgatcagaatgtacaattaaagttgtttttgtatgtatgygatgttgccttggctttcgtgttatggatatatgcttttggtcaacctttctaggtggcttttagtttcatttgttgattataaggaaaaaaatcacaactgtatttcagaacaattttgttattatgtataaaagccacaaaatgatatgaaaagaagtaaaattatggttcccttcacaagcttaacttgggtattttatgccrtatatattaaagcagaaatttaacatcacttagcattccagaaaatactagaaatgcataaaggaggactgtctttagttgctatgggaaccatttgctctaaaaaattttgagtacttaaaatcacatccattattgttttagtcagttaaatatctatatctatatttatataatatactgaacaatcagactgaagctactgaaaacctttaggcgtataccttatgttttaacttaatatgattttggattacctttatttaaaaataaacatttcttttatattgatgaaacagtataacatgtctagggatactctagaagaaattaattaataatttttcctttgtgatattatctaactcagccaaaaaaagatgtaagcaacaggtgctgtaggatgtggcaggaacaggtagggcagtagagagccccttcctccatagcaaccttgaggtctcctggcctcgacttgaaattggactttttatttttatttttttctttccagcttttattttaggtcagagggtacacatgcaggtttgttacatgggtagattttgtgttgytggggtttggtgtacaagtrgttttgtcacccaggtggcgaacataatacctgttaggtagttttttgaccctcaccttcctcccaccctccaccctaaagtagaccctgtgtctgaaattgsrcttttaaaactactggtcaggttgtgtcagtctggagggcagaagagaaggaagggcatcaccactaatcttaaggtctgcttcctttggccctacaaaccatacattctgggaaagccttctttcttcttttattatattcagcggaaggttcacttgctcttcttgcttccaagtatccgaggctatcccatgagaaaggaagacagagatggccatggttggggctgcctgcttcatggggcyggcgggaactgggaacaggtagaagccccacccactgctgagctggcagggcaggaacctcatgctccctgagcacagctgcggctgcccagccatggctgcagacccagcatccctgtgctcttagaggctgggagcaggcaggagccctgccctcccaggtgcagctgcagctacccagccacggctgtggacctgggcatctttgcactctcagggacccaggaagacacccctgcacctgcaggcttcgaagtacctgcttccactgcctggcctctccctgttcccagtgcccgcttcaatcttggagcaaagttgaggctaaacccaggtgctgtcgcaacccagccaggtgtgtgtgcacccagggcagcacttacatgccagccccctgccgcctcagccccttcctgactttaggcactgacaagcatgggaggaaggctgagggggtgttgagggcagtttggcactggcctgcaggtgcccctcagcatgaacagcctgagtaccatgaacaggaggcagacaggctccagggcagatgggggagttccccggtgaagtcccaccttcaagccaaggaaggcctgaagcctgggagctgtcagtcctgcagttcgggagtgggaaattatcgtgcttttttgatgcccacccatggccacccatgaacctgtcagcacacacttcctcccctctgaagcccatgaaatccatggactcagccagactcgagcactcaggccgacctgcctggagagagaagctgcccactccagggtctcctctctgctgagagctgagcacttgactggatgacctgcctgcrtacaggagctacccactcaagggtctcctctctgctgagtgctaaacacttgttgggacaccctcactgtggagcaaagctgaccactatgggtttcctttgcgctattctgtcattcagtaaagctcctgttcaccttactcaccctccacttgtctgcatacctcattcttcctagacacaggacaagaactcgggacccaccaaatggcagggctgcaagggctataacacaagcagggctgaaacatgctccttgctcaccacgttgtgggtgacaagaaagaaggagagaagacctacagcccttcagggagcccagacctagaagctccccgagccagggctgtgacaccctcttcgtggctctgcagttcctggtgtctgaagtttctgggtgccaccacgttccccattgccagccttggaagctgcttgcagggagctggtgcccatgccrgcacctggagctgcccrtcccaccacagccagtgtgcctggctgtgctcagtggccagatcccatgctcgctcactcacacacccgtcacctctcccaactcgcccttggcaggcatggaatccaggccggtagtgtcagccgagcgcagcctgccaagccaagtgggcccrctgggcccgagcaaaactcaggtaaaggygccactggccacagaggtttctggctggcgaagcaacaccccaaggatcccataacattatcagccattgatgatcattgccttggttcattaattcattaggagttgcagaatggtctaggtctatcagtcacttactgtcatcacctaaaagtgaccaaggtagttataattattgttgtcatcatcagcattgtcgtcatcagcttgtgtgtttgaacacatttgatgtgtttcagtccattgcgcttaatatctttattgctgctcatgtcttccccagccttccagtggggcttactctgcatgggtgactcctgtcctggtccatttcagggagcttctttgctttctggtgtgatgacatattctaggtgtatattttccattttctacttcagacctagaattggccatttttccagggaatcctggttgtttttctgtgggaaatggccattagaamttacaatctgaacatagagatgctcattactactttatttattttattgtttattgtttttggatcttctcattggagagagctaagatatcttggtatgcacacatayacacatttaaagacaaactgtgccctgagtgcatactgacaattcctatgcaaattcaaaactgtagggattttaacctcctttatcttacatctttatcctctttcaactatgttttcagaagagttgtatattttaaggcatattgactaaggaaaagtgacgttattaaccagccgtgtgaatgactagcctggccttttagatcatgtttgagaggtagcacaagcactgccactctccccatactagagtgctataaatacagtttaaaagtgaactggcttgagacctagttttgcaaaggtttgaacctttaaatatatgaaaaaatgttcgtcagtgttgggctccttagtttgatttggccaagttaacccagttaacagttgggatatttgattttaagaccacagaacttctarttttgctggcatttctagttactgcatttattaggtatattctatattatttggattaacttctagataaaatttaaatacaggtttattaaatgatgttattcagctattatgaatatatcacaaaatgaactatgtctaaatagcaaaatgaagctctaaatttccataatcaaattcttcttgaatataccaataataataggatataactttggatatctgtatgttattttggctatctgtatattcattagccaacttaacgtgtgcttgtcaatatatattgctagcatatgatgatacaagtcagaatttttagttttagtacagtactccaaattgataaatatttgggttaacttggttgtggtctagaaatcaaaggtcaacactatgttaattattaaaatcaaacttatgggctatataaaggtagattcttctttgagatgttcgattaatacaggatttagcttgcataagatatttcaaacaaaattactccaggccctgctgatgttattagtgatgtcggtggtaagaatttcaatcaatatctcacaaatgggcacatttgaaagttggataatacagactattttcactattgaagaaatgaaagtgccgtttaatccccacctgtatgtctgaggaagggggactggctcagagctccctgctgatgcctgcgtactcagagcagctccaaaatgcctgagattgattaatttgctgcaagtgctgctaacttcccagacctcaatttctttcaatcattgctctgattattgcaaaactatttctgaaagacttaatatgtatcttttgctggtaaattactgctcatttagaagtcctagagttagtccattgcatagagaaggttgtaagtctaatttaaataactatcagtacttttttctagcctgctcaaattgaaatacatgcacatttgaagatactcttgcttttataaagagctgtatttaacccggtcagatatctcctctcaggcatcatcattatggttatttcactaagtggacaaaagatgggtcagtgatttatttaacaacccaggacattcggtcactgtgctttgcatggtgtctgaggtttttgttcccaacaactgtgtcctaggctgtctctcccagtgaactctcatatggtaaagaacagtgcgatgcccatccttcatcattttttatggtccttctgtcacgctrttaagaatgtagagtgccagtgcttgacggggctgcctgtttcttattctgaaaatggggcaaaatgtggctgacaattttgctgtgtccacctgatgtatattttcacaattttgttttgctgtgggtttctagatgctcagtggtacctgaggttctgaacacactgacctctccaggtgtcactgtcatggggaaaggacggtaggggcagactctcatgcctgtctgcacctgacttgcagcaaaggaattggggckggccatcactccccacacttcacwgtttaattccagcctagggaatggaatctggggaccaaaagacatcttaaaatcaatttagtcacttgttcaatgcctgaatcacttttaatatcaccaccagtcctccctaggatgtacaaggcatggtttatatgttaaagttagagcaataaaaaccaggcaaggatccctgccttcatgggacttgtattctagtaggggagatagagagcaactatggtaagtaagagaattatgcagcatgttaggaaggggtcagtggcactcataaaggaacagctaggtggtgccaagtaggagcatgtttcagtttggaatttaggcgtcaggttaggcctcagtgaagtatttgagcagtccctggaaggagatggagttggctctgggggatgggtgggaagcattctaggaggaggaagaggtctcaaggaaggaggaagcctggtctggaaagaacagccaggagtccacatggtggggctgagtcagccggcacagtggtgcggccatggcacagtgggactgggagtgcctgaggatgggaggactgggtgtgtgccttctcggtggtcgttcttagtaccttagcctgtactccaaaatctataatcagaaagtttccatatctaatttggtagcaaaacctccccatttttgtaattcatttggtgaccaaacctgacctgaatggatgtgaagctatttagggtttctgttttttcctccttaaagtcaatattcctaggtttggatgcagaaatgtcaaaacctaggaattatggggtgctgtctcagactttccttggggtgtcaaagaatatgcagtgcagatgcctttatgaaataaaataaaaaatctgaattctgaaccacattttactgcgaggatttcaaataagtaagtactggtgacttttactagtatcctgtggcccagacattcacatcccattcctgttttacgtgcctgtccttttcatgctggaagatggttgtcctctccccctcattctcagccagctgcgttaatgactagcctggtctccagctcctccccttcttcagttccctaactgtgggccaggggatttattcactgtctagcccacagtcctctgaacaagtctgcttctcttatgctctgccgaaagcctgaggctccaaatggaatgctgtgtgctgggacagggacaagagggaccatctctccagatacttcattaatacaactgaaaattgaattaggattttagacaaaaacctgctccacaattgttatgtatgttttaatgatgaagatgatgctaaatcagaactctatccacttaacaaagtctgattttacagggaagcatcagatgcacatttatttttattgatgtttatcttgttttaatttattgtttggctttgtagatatctttttccatccctttttgttaatttatgtgctcatatattgtcacctgttcatttgagaagcacatctatgactatcaaaggcaggaataaacttgttgggagaagtcagggatgaggaaatagccttgtgccaaggcaccagaaacagacgtcagcgttggtgccaacgagcagctgcgactctggtcgcttgcatgtttctagtccacctgatcttcctggcagttagcccatcttgttctccttgtgtccacagagctatcataggagacattgtctggtgctttgccagtgactctgaacactgtgcttcctcatttcctcatgctccaagaaatatggttcgacactggaggaagaaaagtaatacctttcctcacccatcacaaggtttatggctgaaatccctataacaaaagacagattaacaagataaacacataaaaaattatttaatatggctgggtgcgatggctcacacctgtaatcccagcactttaggaggccaaggtgggcaattacaagttcaggatttcgagaccaggctggccaatatggtgaaaccctgtgtctactctaaatacaaaaattagctggttgtggtggcaggcacctgtagtcccagctaactgggaggctgaggcaggaaaattgcttgaacctgggaggcggaggttgaagtgagccaagatcgagctgctgcattccagcctgggtggcagagcaagactccgtctcaaaaaaaaaaaaaaaaatatttaatacaagttttacatggcacaggagccttcagaaaatgaagacccgaatactcagggaaaactgtgtttttatggacagtcgtgtagaagtgtgattgagggacaacagggcaggatctgatggtaataagcggggtgcactgaacaaggcctgtttgttcagattctctgtggcctgtgtgacattcctgccctccagatacagggcaggatacctgccacatgaaggcctttaggggaggatggagggagaagtcagagagtgacctctgagtttcctagcccatctcagggcagaaaggggcaagtggaatttcagtttctgtgtcctgcttrgtgggggggcggggagggaatggtctgcatgatctttctgatgttgtggttttctcagcttctttcagcttaaatacttagtatgccaaggtgccatattttggggtaccatttcctgcactgcatcaacactaacaaagtggagggtgaggtctctctcctcccttctcctccccacccagtactttgaggacatcccctcatttctcctccattagtcccaaagtgcatttgctgccttacgcgtgtcttctyagaatggggctgatagagagcctgatgttgctcttgcacctgacacattttttgctttaagaaccaaggaggggtctctgaatgtgtgcatgtcaggatttcaaaggaaactaataacgtcattgaaggcttgtatctttttccctcgtggatcacatctttctgcgtgttgggtcatttggcctttcgtttctgtgcctctccccatccttgccctgcctggtcctttcttccccatgcttcctctcctgttgcctcacccagctttccccactcctttctgattttctgtcttcacactgtcattcccccgctcttctccagtgtagacggcatgttttcctgtttctttcttctgttttgttatcccactgcccctgtggctcttctgtctcttcatgccttcctggtctggcctctgctcatttcattcatcttatggggtgcctccatggttgctgtctttgggctgctattctagctcatgattccaaagtggggtactctacttcggtgacccaacatgaccttaaagacttgcttatgcacctctgacaaatcaagatgcacgacccctggacaccttcaaaaagccacagggcttttagtttctcagatgatcaccacattggcatcctattgctgctgtaacaaattcgaacctcgtggcttcatcatcttactgttttgcaggtcagaagccctaaaagaaggtgacggcagggttggttcctcccaaaagctctgggaagaatctggtccttgccttttccagattctagaaacctccctcatattttgcctcgtgatcccctcctcacacttcagagcccgtcggcacaacctctgcttctgttatctttccttcacattgacccttctgccttcctcataaatagaaccttgtgattacgtttggccaacccagataatccagtctatctttccatctctagacccttattttaatcatacctgcaaactcctttttgccatgtaaggtaacatagtcccagattctggggactgggatgtagacatctttggaggcccttattctgcctaccacagtcatgatgagttggggcaatgttgctgactgacgacacacagaacctctaaaacattcttttactttccctgttygtctccattgtaaatagggattctttgtctagggtttggggtttaagcctgttaatttagtagaacctcatttttctcttctacccctggaagatttttttccactgaggctgtgattcctagagtcagccagtatttcttgagttctatttattgtgcacctgggtacacaaaatgagtaagatacgaccctggaccttatggacygctagaggagaaagatgttactgcagtagagtacatgttgtgttgatttcattttctagatatctttaggttccgtccctttgtttctgtcttctctcattgtgtcatttgttactatgatttctgaaaacaatttacccagtttcccttgacatcagttggactcacaccgtatctcctccagtccattactgtacacacagaggtgtttgtgttacctctttgcctaaggtccttccattcccagcatcagaatacactgaaatctttaacatgtcatacttcttgttgcagtctgtattgtgcttttccttctagcctttttacctgccataccaagaagcacttctgttcttgccatatgggataagttatacttcccttagagttcccctagagttctcctatactttccctatagtttttttatagttctcctaaagttcccccatagctaccctatatttcccctatagttctgtgctctctcttggctcctgactctgaagagcttctcttattcactagacttttcctctttattccctgcctaagaaacttctgtgcatcctgaagcctgggcttaagcagtgcttcctagaaagcttgcactgacaacatctccaggactatagtttgaatatttgtcccctccaaaactcatgttgaaatattaatcaccagtattaaatcagtatttaatctccagtgtcattattgagaggtggggcctttaagaggtgattgggtcatcataggagagccctcattaatggattaatacatgtgtggattagtggattaatgggttatcatgggagagggaccagtggctttatgagaagaggagagacttgaactagcacactcagccccctcaccatgtgatgccctatgctgcctcaggaatctgcagagtcccggccgggcgtggtggctcacgcctgtaatcccagcactttgggaggctgaggcgggcagatcatgaggtcaggagattgagaccatcctggtgaacacggtgaaaccccatctctactaaaaatacaaaaaaaaaaaaaaaattatccaggcatggtggcgggcacgtgtagtcccagctatttgggaggcagaggcagggagaatggcgtgaacccgggaggcagagcttgcagtgagcagagatggcgccactgcactccagcctgggcagccaagtgagactccatctcaaaaaaaaaaagagaatatgcagagtccccaccagcaagaaggccctcaccagatgaggccatttgacctgggcttcttagcctccattactgaaagaaataaatttcttyataaattttagtttcagatattctgttataagcaacagaaaacagactaagacatccagtcaggtcttctcctctgtgctatgggaggcagttcattgctctgtattgtaattattgccttgtctgtttttttttctagccagacaataagctcaattaggtaaatgatggttcttttaattttatgctctcttatatgatatagtgtgtgccccataaaagactgtcactgaatattggttgaacgaatgcctgaatccatgcacacatgaatggtttaatacaaaatggcctgcagatttgagtaagatgtgtgatttgctattcctgtgtagattctaagctaaaacgattgctgcttggtttctcctccctatgtactatttctcttgaagctgaagctgacttttcatgtgattaagtacaggagttaaaaatttattaaaggctcattcctgagcattcatatgactcactagagtcacgcagggctcctagtccgaggctgtttattttatagggcccatctgtggcatgaagacagtgctactgtgagtcatactcctctcagcatatgcataaatccaaaaaggagggtttcttttacttgagtgccctcagtatagccttgaatagttgtgaggggtcagtaagtgcaaacttgaaattgtttttgaataaacattcttttgatagatgcttctgtttggaaaaatattaggagattattacaaaaggatattattacaggattcatgccgcaagtaaatagataaataaatggatagatagccctaaggcctctttggttgttgttagcaaacaaatacttacagatatgcaatctgcctttatggcttaatttcttttcccttcaaaaaccagagatgtggttctttttcagtttggaaagaagactagggagtagtatgtctaagattatccttagggctagaatttgcttatttcctggggtggggtgagaatcagagactgaatatctatggaaagcagagaggaacctttctcctgttgtattattaatgctaaatttggttttgtttcattttttaacttcttgatgctgtctatgagaacaaatttagggcatttagtgaaaaaaacacacacagacttatgtgggactttattttctgacttacggcattgtgtggtataaacaagactgttttacagataatactaaagataatgttgatggaactgttcttccccactcgtgatgtttccttccaagtggcaggaactgtactattgcagcactcctgtctgctttctcactgcccaagctgaagctgcctgggaggaagggctgagcatgcctagcccagccccttctttggggagctgactgcctatgggaaccctstccctccatcctgtgagttttacagcagcactgaacatatgggaggccttgtggttttctagggtggcctgggactgggttagtgagtctgtttattctgtgcttcaggattagcaagcccattgttcctgcactcttaagtcatattcctcagtctcaggtttatcagtaataaaggtggtactttgatagccgctctgcctttctccttgaattcatcrctcaggtgttccrgcgcttgggcggggctgcatggtggaattgttatggctgtgtccttgcgtatgcctgtgggttctcccagcagccctgacagtgggtggtatcatctcctctttacagattaggaagtgaggctctatgaaggttaaccactctggatgatcactataggtttggcatactggtcaggctaactcccaaacttgtgtcccttaggtgattcggccaatgaaaatatcacagataaaagcttttaaaggactttgcatagtataaatcactgggtaatacagatgagtttgattcctttgtaggctagcattttcatagctatgaatgtaaacattttaatatagcctgcaagtccctgagcacacaggtgcttgcccacctccctagctccactggctgccttaacttcatccaaagccttcatctctttctcaccatcttgagcttcctgtagcgtttcctataactagaatgctcttcccctctcacccttcccctttgcctggttagcttctgtttacccttcagatctcaactcacatgtcacttcctcagactagcctcccacagccactatatctgcagtttgtctgcaatggggtttctgctagccagctcatctttcctaaaccaccctggccatcgtttytgattatgtattcactctaaacctatacaccccaaacaactgcaggcccataagcccagccaccacttttcttttgggtaccattgtgatcatgctatcttgacatagtgatagctcctggttgggatgccaagagtggttgctgagtgaataacggacatagtgcttgggcattacgcttggcataatgatcatgtattagccttgaggtctttgtccattgttttttactaatacttataaataacatgttaaagatagcctctttcctgattataaaatacacacacacacacacacacacacacacacacacacacacacacacaggtttccgctttcagggctagatatttgtccatattcgtatttgtctatgggggactgttggtgtgagaaactttatatatatgtgtgtgtatatatattatatatagagagagagagaaagagagagagaagagagagcacaagagcaagagcacatacaagagagagaactaaaatctctaacctgcttttgagactttaaatctctaacctgcttttgaagccacgaggtttgaggctttaaactattggaagcatagaatggatttccaagtgtgcataactaaaagggttacttaatatatggggataataaaagaccatatatggggataataaaagaccaaactgccccagctgtggaactttgtttatgtggtcctggggatatgggatgtagagaggaacctctcttgttacgtatgaatgtcatttaatagttactaggcacctaattctgtttggttttgtatatccaggaagaacgtcaaaagggttgaactattcttttagtcctgttcaatagggagtactctaaaacctaacttatagttgaatgttattcttaatacagtgtttattacttcatttataaaatgaggtcagtaataggatagtgggtgagctacttttatttcctagtcaagcatacaaataagagaaagtgctataagaccaaatgtggatagtttgaaaacaaggtaacaagttttctgtatttttactcccctgttgcactaattaacataatattttgaagaggcaaaaacaaaaaatgtcttcacacttaattttgcatcgctcagtctttaaggtgttgatcatggcagaattttagtttcctgctcagctattctcctggtacaactgcccatgggtaataagcaactgcaccaaggtctgcatgaaaacagcatggataatataccattgggtgtctgactgttttgctctgacagcttatwttgcttctttttgtcctccccaccccacttgatacagggcattgatgtgcgagatgctccyctgaaggaaatcaaggtgaccagctcccgacgcttcattgcttcatttaatgttgtgaataccaccaaacgagatgctggaaagtaccgctgcatgattcgcactgaaggaggtgttggaatatcaaactrtgcagagttggtagttaaaggtatttaatgtgtttttataccagaatattcttctaaagtagatatgttaggtgttgttagttcattatccctttaaagctcaaacttacccttgtctgtttctgagcagtggtttgatgacaggctattttgatggattgcattttaagtacaaattttgcacgtgaacaatatttttgaaaaatgtgttttatctatgttgatttagttgcacaaaaaacaatgaatgtgctcttggcaaagtcttctgccaactctatatacagagattacaacttataaattttttttaaggaataaaattttttactgatgaaaaatcacttaaaatgcaaatattcatcagccagcgtgtttatgatagcagagtggttaataaaatgaagcagtgtcagtataaacatgctcagtcatatcacacaagccatattgataattctgtgttaacattcataatgttccagttaggttctrttactatattttgcatgactgaaaaattgagtcattatatttaagaaggtgggggatgagggaaaatagaaaggggaaataagtttcctttagccggtttaatgggttttttgtaggctgaggaatttatagcattaagccaccaagacaatttttggtcccagacaggataatttggactttgaggtgtaccatgaggcatttttagacaacctgtggcaagccattgctgtttttcctaggagaacagaatgaggactgctttaagaaaagttttccctgcatttgttaaatatggcacataaaattgatctctctacatatataatcccagcactttgagaagctgaggccagaagttccagaccagcctgggcaacatattgagactccacctctacaaaaatttgtaaaaataaaaaaagctagccaggtgtggtggcagtgcctatactcccagctagtcaggaggctgaggtgggaggattacctgagtccaggagttctaggctgcagtgagctatgattgtgcccctgcattccagccaacctggacagagtgagaccctgtgtcttagacaaaaattgtctgtttcttatgtggtataaaagcaatagcttttatctgcacatttctcaagataggcarctttaaagattgctggattcaaatcccagaactaggtatgtggctatgggccagtggcttgccctgtatgtgctgctgtttccttgtgtgtaaggtagatatcagataataatgttatctaccttacagggccatgaggaagatcaaatgcaaagtgtatattatatataggacacttagtatacatagtgagcrrtgggtgcttgaaaggcccttggtgggaagggagaggaggacagggataaacttctctctggtccagtctgtcagtggtcttcactggggaatggatgtcwgaactacctttctgactttttaaaaatrtaaatacctgcccacctattgtctcctccctgtctggccacacccatattgagtcagaatatccagggacacagcctctgttataaaacctccaatgagtcagccatatgctctgttgtgagatcaccactgccagtgttagttagtcacacgtagcttatgggggacagtgcaccccagtgaggccacctcgagaatcgtctgcagcagtgactgatgttcggcgtaaggaagtgcacrttaagatatctactcggataatgtatttgtcacagcagattcttaacatgtttttatttgtgatgagacttgaaccagcctaatatttaggtttaaagtctctaacaaaactaagattcttccctgctgtacacaccctaccctgttgaaagtgctctggcaagtgagacatcatgatgtacagaaaggacactagtttgcctacaaactgttttgtcattttagagttcatcattatcatcatcattattactaccattatttaattttcatcttggttcatttgtttttgattatttttccttttctttcagttgctatactgcttcactgtgacctgccactacccatgttattgattagtgggatgcaaatctagtagtatctctaaaaattcccttgtggaaaagttaatttgttggaagttataagtaaattataaatttctagtctacctgaacaaacataaatagaaagaatgaatagattcgtattcatatttgtgcaccacattttcctgtcttatggcagtgtagtagtatcttggctcactgtgataaaaattaccagggacttatttccatttccgcacactgccacagctcatgacaatttgcatgcagttaggactcaaatatgaaatttaactttttctccaattataattttatggccatattttrtatatagatatattttttaatgagataacatgctagatactactagttttataaggttattaccttgaggcaattactttaaaatatacactaacatttttaggccacttgtctataatttaacacttttttatataccatatcatatttggagtgctaaattttacaaatgggagaaactaaagtccatagagtttttaaccttttaaggtcacacactgatttgtggccagcctcccaaataaagaccaagtcctttaattgactaaccatcactctcatctttattcatgtctagccacttttgataaccaaggacataaaaatatttcatataatctccacaatgcatgtatatatgcatatatatatcaataccctatttagttacgtttctatatttcatatgtaaacatatttcatacagttaaatatgatactgacatatttattgatgtattaggcatttacatgtgcgtatccattagatatatgtctgtgtgtgtataaatactgccattactggcttgatttagaattagttttatggtgtcctttcacttgaattaagaaatattttaaattgcattttatcactttgtacagattaagattcttgccttctccttccttccttctttacctctttcwtcctttccctttgggaaaatttgttgaaaatgcaaatgtggccgggcacagtggctcatgcctgtaatcccagcactttgggaggctgaggcgggtggatcacaaggtcaggagattgagaccatcctggctaacacggtgaaaccctgtctctactaaaaatacaaaattagccgggcatggtggcgggcgcctgtagtcccagctactcggaaggctgaggcaggagaatggtgtgaacctgggagacagagcttgcagtgagccaagatggcgacactgcactgggcgacagagcaagactccatctcaaaaaaaaaaaaaaagaaaagaaaatgtaaatgttggccgggcgtggtggctcatgcctataatcccagcactttgggaggycgaggctggcagatcacttgaggtcaggagttcgagaccagcccggccaacatggtgaaactccatttctagtagaaatacaaaaactaaccagctgtggtggcacacacctgtaatcccagctactcaggaggctggggctggagaatcacttgaacctgggaggcggaggctgcagtgagccaygatggtgccactgcactgcagcctcggtgacagagcaagattctgtctaaaaacgaaaatttaaatgttgccgtattcttgtgctgattcttctgtaaaccaaaagtccttttgaatgtctgtcccaattatttccaggttctagttgaatacttcatttgatttagcatatctggtacttttcttaatggagaattaaaacagaaaacattctcaggaaacaaatgcattaaagtcccatctattttaggatactagttacaatgtcttaaatgagtgagtgtactcatgaccctttgtgactttgcccctgagtttcattttgaatggcagttcaacaacccttgctagcatttgcaactcgaaagtaattaactgctctttcagtctggctacataaatgccttaggatgtaccataaaaggcccatttcatgtctcggttcaaggaatcgcctaatgataygaattgatgttaaatcattgtgagttaaggcagagctgtttaaagaaatgaaaaaccagcacaaagtttcagtttataaacaacaggaacaatattttagtaaatttacattatgtttgtagtctctgaaggaaaattcattcacagttttgtgtcttattttgacttagtcgagtgagatttccccagcaattgtaaaaagtcagtatgacttatcccaccttgaatataaaaaagaactaagacaaccaactcaacaaagggaaccaatgttgctggtttttagctggtctaggagtttacccggtatcagctcaggtgcaaacctcatgtggtgctagcttctctgaggtcctctgcagcagggaacatggctgtgatcgattagctatgtctgccatgcaagaggatgcaagagggtagcagaaatttcagcaagcaagccagcattccagtaataggatatagcggattttatttttccgtgcatttgtatgagcaaaatgaggagttaaaaacagaacatgccaaaaaggcacaaaccacccatagatacagtcttgaaaaaartcactagatttatgtttttctgagagggagatttatkccggtagaaatacgttgttttgtacaatgatctcatttatcatgtgtggtatcacccacagtggcatcggcatgtggaataccttcatttggtgcctagagagcctttcaacgggcatctaactaatatactgggagtactatttatgataagattgacaatgatataggaaagagtcggtctcagattttaaacaaagagagggactttcttgggttgtaaagtgtgtttgctagtgatttcttagttttatcaagctgtgcatggtatgttttttgcttcagagctttcctttctattcactgctttagtaagacttactactggaagttccctgaatggcagcagtggtggacttcattatccagaatgctcgattctcctgtagcaaaatgaatccattgtgatagttattttggaaaatgagtcatcctggaaatgtatttttgatgagataaactgtaatttcaggcatgtttttaaagtggtgatacctttggaatataaatataaggaaacaatttaatgatataagaactaatacctttgatgattttgaagacattctcaataaggagattaacaatgaatgcttcctagagcttaaatactactacttgagagaacttttaccagttaactttagtggaaaaaaaaaatcctttgatatctgtgtaactgactcactgtaatgagtgggcttactcattcaagatattgtaattagtatcctaaaacaggcatcactttaatgcatttttgtcttgagaatattttctgtattcaccattacaaaaagtatcagatatgctaatttgcatatgctatgcacggtggttggtgtcctaaaacaaattagggttatgcctacttgaataagcttatgtgtttaaagatggtttatttcacaactttgaatgctatgaaaatctttttcaacatactttttcttgttaacccaaacaaaatttttctcatcaatttattcctgaaattttattatcttctacattttaataattgatgcatgtttagctcttttaagactgaagacaaagcatctgaaagacagctttctggtttgtctttcagaaccacccgttcctattgccccacctcagctcgcctctgtaggagccacctacctgtggatacagctcaacgccaactccatcaatggggatgggcccattgtggcccgagaggtggagtactgcacggccagtgggagctggaatgaccggcagccagtygattccacgagctataaaattggacaccttgacccagatacagaatatgagattagtgtgctcctgaccaggccaggggagggtggcactggctctcctggtccagctctcaggacaagaacaaagtgtgctggtgagtataaggaaccctgcaattaattgtcattgtctttcctggtgttgactggcagcactggggttgatcagatgcctagcacgcttcccctagctctatcaaaacctgcrtatgaacagaaaatgcccttagcctgtgaatagtcagctaacagcttgtgaacttggggaccagtaacctccaggcttggtatttctcagcctgcccccaccctttttcctattgttaatttacttcttactctgagtaccacattgttcatataggaattgtctgtgaagtttacagaaactgtctactctaatgatgtcctctaataggtcagactctcttacttgggcccctttgttttatgttcatagttaatgtgccagcagcctggaggggctctggaataacagattccatcttagagatagccttaaagatgtgttttcattgatgagtgtttaatggagggtctgctggcgaatgacttgggcctgtttgtatcataagcaagagtgatttgtgtgctgggtgcagtctttagtttcttagattataaatttctaattgtgctaaacccattccgcaacttaagtaaaagtagggttaatggagagagaagtgtaaaatcttccaaaaatcaaaacctgaatgaagctccccaattagagattgtagtgttgtttccgtatggctactctgtggtaggaagcagagagaaacagtatattgggatatttaagtgctcttttgtcttgtaaatgaggaatttctgtgttgaattgtgtgctgagatgaggagattccataaattgttatggtgttagttaattattcagatagcattagataagaatacatttatcaatgtttcatttctttcttaagttttaaaaatgcttagcatagtcagattctatctggtaggagtaagagaaattattaaaccttaaccattgtagctggtttttaaattttttcttcataatttgtattatactgtttccacaagttcaatactcatggaaaattctgtattttaaaaaagacttttgttagaaaagggaacaggtacttttttcttctggggatacatgctattgagtacagggactggcctgggttagtagactgtgtactttgctgttttgtacatctttcatctgtttctcagaccccacatctgtatcctcgtggcacctttgtgcaggcagtctggtccctggaataagacctgctgttttgatttggtgattcccacagccctgagtggtggctctaaggagaaaggagaatttcccaatcctttctcttcctgtcttctttaaacctcgtcatctcctctatttagttgaataaattccatcattgttgtaaaagttttatcttatcatttgttgcaatgcaaacaatagctatggataatactgcctatatcatttgacaagataggcattgctttcaaatctgttattttaccactgccttatgaattctccagggcaggttctttgatccccataatacagatggtgaaagtgaagcccgtgtgagctcctttctacttctaagctcactctgtaagaagtaagtttagtgttatttcactttagtgttaagaattcctgttttgggcatggcaatatatggtttctctctctctccaaaagcaggttagaatttcattgtttagactggagagagactgtgatctgtttcaattctagtcactagcagccccacctacataatgtttccagtccygttcttttttttttttttacacatttttgccttttcttttggttttgtgtctgtacatctcagctattgacacattgctgtatatatatccactgattataatgcatgtgtctgtgttttcaggaagccttttgatgctgctgcataatgtgtaaatggataatgctcaaagagacaaattaccttttaataatagattgacagttatttttaagaaatgaaaaccaattttgaattgatatttgtaggcccacactgtgcctcaatgtatgaaacctcacctaaaccaggaagcctaatgacgatgcgccctttcctcttaactgtttgcagcctgcagttggcactgttcgtgatgcatggtctggttgtgccctgtgctggcatggagtcacccttagaaaatggagagagatatgttaggtgaaagggtcaaagttagaaagaagaggggaaggcatgttaggtgggtgaggaaagtgaaaggtgaggaaagtgaagtcaaatgagactttttgctataggaagaaatatggttcaccctttcttgacctggggttttgagaaaatctgcaggtaatatcagtaatcactgattatgatcagtgtggaattttgggaagcaggagcaagttaaagggaaacgtgtgctgtaaattatagactgaaagtttggtatcagtcccaaagtattattcagatggtttgtgagcatttagagtacctaaagagcaaatcatggatttcataaacatgggagagactagaagcattctgcagcaataagtggaaaacatccttggccaggggcaaatggttgatgaatctaacagggtgataagtaataggaataaatctaaatccttcctgtatggttcaaaaaagccaagagtactggcttggaattagagtaatacaatttagcagcaatatgtatgaagaagagattgaggatttggcttcaatgcaaatgaatctacaatatcatccatcttgtataaattatccctgtgatgttagtgcctcaccatcccctgcaaaaaaaaaaaaaaaaaaatcctaaaataatcttaggttgcatcaggaaagcaaaatgcccatattgaaggaggtgatagccttactctaccagtgctgtttaggcttctcataattctcacatttatttctagttcctgctttttaagagagacagcacaaaatagattttgcccatggggagagcaatcaggataggaaaggatgtggaacctttcttaactaatgaggaatggtggaaagaactgagaaggggatggggaggaaagggcacctgtgtaaactcgacaagatctgagtgagtttcttgtggctgatttgttcaagcataacctgacatggtagaaattgatttctatattcagaagaggattgagctggttgaccttgaagatctcttcagtatgaaattctatgattcatttcttgtttgctttctgatgagatgatccaccggatatttctaccctgaaagcctttcagtttcatttttatttcatccttgtctaaatactccataatcatgcttatcaagtactattctttgggcagtgaaggtctgctattacatttccaaaaatccgagcaaagggggagaacgtataagtttttattacagtgaagtaaaataaatttgaaggactgactcactctgagatttcctgcctgggttttgtgctaaaacatcacttcagttcttgaaataatagtgcttttgggtgctagagccagagtcagcggttgagaacacaggctctgggagcagctacctgagttttagtgttggctctgcctggcactagacayaggactagagaaaaactgctraccctctctgggcctgagttgccttatctataaaacagaggtgatgataataataatatgtgtttcattgttttgttgtgagccttaatgagctactgaatatcagttgcctagaacaaactcttacatatagcatgtggtcaatcagagttaactaccatttaataaatttttgtctyttaatattttcattcagaagaattagacactggctacctcattacccaatgttttagaaatattgcttatctgggaaatctaaaatctgagaaccatgatttctattgtgggctcatagaattctttgcagttgtgcattatgttctcatctgttaaatctgtttattttggccaagctctgtgttttcgtttctgtgctgcatcagtgacacctgtcctatcattttttggtgacacccatgaaactgtatttagcttcttgtattaaaatggcaagatcactatttattacccatcattcctgtgtggcttgtagacacagtctcattacctggttggatttctgcaaggattgtattgtaacacacttccaaaactcttgcttcttatgcttctgaaaattatttccaaatatatgcacaagctctccatgcaagaccttgatccaatcacatagcttccctgattccacatcttcatctctaatttggggcagcaacacctgccctgactgtatcagtggtgtttttgaagatcagggtagattttatctgtaaagacatttttcaaagtgataaaatgccctgtcaatatgggttattgtaaaaagtgattatagtcaagctaccttcaagctttatatacatatccagttgttttccaactttgcagttcagctatagttgggtaacttcagagagttaaaattacttcagcatccagttaaacaaaatgcaatttagtttgtgatttctaatgtatcctatattctcaaattatgtgcagcctgtatatcataagccattgaatagtagctacttgaaacagagaaatgggtgatgttgttagattaattttcacagtgggcttttttatgtgttttatttggagatacttctttttatgtattctggttattggttattaactgtggttaagtgacttgccaataactggccccaggagctaacgaaggattattataaactaatgactaaacaattaagattggtgagagtgaagcaaagcttaattaaaatgtgtcctttagcattaatatacctaaaaatatttgaaacaataatgattgcaccttaaaaaattatccataagatgcatattgagcatccgtatttgccgggcactattccaagccctgccagtagagtgacaagatttctgtcttcagaacttatatattttggggtactggaggaagggagtatataggcaacatatatatatatatatatayayayayacacacacacacacacacacacacacgtgtggccaaggcaggaggactgcttgatactaggagtttgaggacagccagggaaacatagcaagactccattgctacaaaaaattaaatgaagaataattagctgggcaccgtggcatacatctgtagtcccagctacttggaaggctgagataggaggataacttgagcccaggagttggagattgcagtgagctgtaatcacaccactgcactccakcatcgacagagtaaaaccctgtctctaatatatatatattactcacatacctacacacaacacatgtgtatacaatacagtgtcagataaatgataaatgttatgaagaaaaatagaagaagggatagagaatagagaggtaggagatgatattttttattattttactatgtttaaatacacataacaaaacttaccatcttaacgagttttaagtgtacagttaaatcatgttaagtatattcagccaatctccagaacctgtttctcgtgtgtgggtacatagtaggtgtatatatttatgaggtacacgaaatattttgatacaggcatgcaatatgtaataatcacatcggggtaaatggggtatccatcacctgaagcatttatcctttgtgttacaaacaatccagttacactctttgttatttttaaatgtacaattattattgactcttgtcaccctattgtgctatcaaatactagtttcattgagaatctttacatcttcccaaactgaaacactgcatccactaaacactaactctccactccccttccccataaccctggcaaccaccagtctcctttttgtctctatggatttaactatttaggtgtctcctataagtggaatcatgcagtatttgtctttctgtgactggcttattccacgtagcataatgttctccaggtttatccatgtcatcacgtgtgcgattgcacctttttaattatgctgataattgaattgtatatatttgtttcatataattctttgtgaactacttagagactataagcactgactttggcattcagtttaaaaatgcaccttctttatgacttagggaaatgtttactagtaaagcatgtactgctgggttcctgaggagtccaagtatgatcagttatcctagaaatgttctgtcctaatggcagagccatcccatccacagctagcctgctgcttgctgggaataggagtgatgtattagaagtctttaataaatgtgatgtgtaagaagtatacacatttttataaatgtgattttttataaaagcgatagtgtttttataacttccatttttttaaatgattgagtgagttttaatatctgtctgcgtagagctatatatttgtctgcctagtatctgcctagttagagctttttacataactataataaaaacttggaatatgtattacattaaaatgtattttgttgtacttagatgctttgataacatgcagtaatagctatcatatctgcagtattttcagtggcagaagatactggacataccttgccactatttggagtcatttcacctttcaatctttgttctgtgaaaygttcagtgtctgcttatcccatttgtgatatgcagttttgtgaatctcctatttttttgtgatgacagtcgtactgttgcacttgaacagatgtatttgtgtagctttcttgtatgcctgccttgttcttctrtgaacaaataacatacataaacaaacatatatttgggggtattggagggagggaatatataggcaacatatatatacatatggaggataaacaaaggattagtgttccttcacagtaaggacccaacattcccgactgtgggaattttgtactaaatacaaatttacggtgttgtgttttcttttatcttataccctgagaatatctctcagtgtgccttatgtagtagcacaccctgtctgtcatacccggtccagtctaaatgtcactagatttaggttcatattggttttgaaatattaattcgctgtgtttgcctagtggtaacactggagtgattcgttttaaatatatctgaatgagattctcatgttggaaatgagtagtgacaggttccttggcaagggggcattacatgaagcccaaactgcaccatgcctgcattcaaccgaaggctgacctcgctgctatttatttaytatttttagtttgtttctgtgggaaaaaaggaaataattctggttgaaatgggaataatctgaaattaaaccctgccaaaacctgatgtattttctcttaaatcaaagatagtagtatttgtgttttctgtacagaattatcactggcattgcaataagtatctggacttacagggctgaccctcaggtacctggggccatgtgggagctaatctaacaatggctgttattcggaaggcataaaggccaaagacctaattgagtggagcataatttatttttgatttaagtttatttaccagggaagaaattaaaagtgttctaattctaaaacagttctgccacagggcaacatgttttaatgaattttcaatacatgaagccattaaaaacctttttaaattatgaacattaaaagggcatgaggagtaccttccctattatgctgcagatgtcagatactttgggtcacgtcaccgtgtacataggacaggggcatatcagcaatgcagtgtcttttttattataatatattcagtcccttccttacaggtgtttaggccccagagattctgtaattaatacctaaacctcaagttctgctgcccttaaacacggattcagcactttccctgtgcttgaaccctaaggcagcagcagaggggtatagaatagaactgctggagcaattctgcatgagaggttcagaagctcctctaaaaagtgtggacagatggaggtggttgttcatagagttatccagtgactcttaaggtgttgtgactctctggaaggtgtcaggcaggccctttggctgtgaaaaatgagcgtgctaacagtgctcctcaacttcctctaggcttgtttttgaaatctttgtaggtggcttcttgtgtagctttgaatacactgaggaggccaggaaaatcaagggaaagagctggagattgcagtcgggggcctgtggcctagtcctgctgtccctctaatgagccatctaacatggggaagaatcacagaaccgtttcaggctgtattttgtctgtctatctgtgaggggcttgaccagcttccttgttctagggatctgacaggtcatcagtcgctgtcagagggggtttgctatgggaaaaacatgattgttgttagtatgaggccttgtctgagcaccagctacagctgtgagcgtggtcctgcagcccctgacatgtttgaggatgcctctgcatcctgctgcaatatctcctaggaaaggaagacatctactaaatctgctttgaacaattcttaaagagaccccaggccatcttaatttcccccaaatctcttatatatttagtaagaaaaaaaattattgatgatgacatgattaattttttattagagcacatgccttaattctttatcacatttataatgtggagaggttatattttatgatctttatgttagcatttatactacactggggtcctatgcataatctgtatgtactgcatacgtatgtgttttaaaaggacttggagcataattgactgctttaaattatcatagaggcttatacttttgtgactgcctttgtgaacattcagaggaaacagtgttcccctgggaaacttctttcactttatagtctgactgacttgggtgggtgaatgttggttctggcacaaatagctaaaaactctcaacaaacgagttaaccttgctattcctagtttcttaatccttctggtcagtgtttttttgttgttgttgttgtttgtttgtttgttttaaacagtaccagcattgtcttcataatgctgctgggaaaattacatatgctaatgcaggaaaacttgttagcagagtactttggtcacctggtggctcccgaatgaatcctaagtaggtttactattaaatgctgatacaaaattatgttttgttaccacaagggaaacacactsctatggtgaaatctttcaataggacttttaagctgaatggattgggttgcatttgacacatatacaagttgcagtttaagcaaaacaaaaaatatgtatgtatcttcaaggtagtgccaagaaaaagaaatgatcacatgttcactggaacctgggaaaactttttgttttgcctccttaaggtgtggtcgggatagaaaatagcatagtgacccagggtccctgttctgcagggtggcaaaaaartagaataactgcaaatacttcatttacatatgagacaytgttatgctgtggttgtggatgtgttgcaattattagtgacatgataagtgtttttgacacttttaactttttggagggttctgcccccactctaacactttttttttttttttttttttgagacggagtttcgctcttgtgtacccaggctggagtgcaatgtgcaatggcatgatctcggctcactgcaacctccgcctcccagttacaagcgattcttctgtgtcagccccccaagtagctcggattacaggcacgcgccaccacgcccagctaatatttttgtatttagcagagatggggtttcaccatgttaatcaggctggtagtgaactcctgacctcaggtgatctacccgccttggcctcccaaagtactaggattacatgcatgtgccacctcacccagcccactctaacacttgtaagtttatccagaggactcaaagcttgatggcagtttgcttagagctagaaggctgaggtgcgctgggagacatgtttctcttttgctcatttgcacacataccccaggaaggtaggtgaacccttattgagtgagattggatggctggggtcttggtggtgtggatgtaaggaattaaagcacacaggtaagattgttcaccatagggctgcttgtgagccaggcttaccttgcatccagtgtcgctggcctcagagcgggcaaagccagtcttagcctttgtcttctgaacattttaggaaaagttcagtcactcttgacttaccaggtatgttatgtgttatgtctggaaccactgtcatgctttgggaagcaggtggattttatcttgacctcatatgtcctgtgtacttccttctatccatgctcctctcagcacatccagatgcattctcttcttattcacccagctctcagtttattcgtcctcattaacacgaaatgtgggctcactgggacatactcagtggcatctggcctccagttaggacttgccaacttcatctgtaaggataatgctgcttgtgcttttaaaagctaaataagaagtaagataaatgagagctaaaacttgtatagtcataacaacagattatgaaagattgataatatgtcaaaattttagtttatgagggttagccatgttcctttgtgtaacacttttataaattaattttaagaatataaataactggtaattacctattagaataaactgcaagtgaatagaatgctttaaaaatgaataacgcatataaatggaatttaaattataaatacaagaaattttattaggaagtatagttatacctgttattaaaatagaaaagataatagagctgtttgataccaaaattgctgatcctccatccatgttattaccattgtggaatgagtaatataagtaatgtaactattcaggtaaaatattcccattgaccaaatagcaatatttccttcttatccatctggacaagtgactgtaaacacatatttatagtcagcattgaaaccctttctagaaggaggagccaagatggccgaataggaacagctccggtctacagctcccagcgtgagcgacgcagaagacgggtgatttctgcatttccatctgaggtaccgggttcatctcactagggagtgccagacagtgggctcaggtcagtgggtgcgcgcaccgtgcgcgagccgaagcagggcgaggcattgcctcacctgggaagcgcaaggggtcagggagttccctttccgagtcaaagaaaggggtgacgggcgcacctggaaaatcgggtcactcccacccgaatactgcgcttttcagaccggcttaaaaaacggcgcaccacgagactatatcccacacctggctcggagggtcctacgcccacggagtctcgctgattgccagcacagcagtctgagatcaaaccgcaaggcggcagcgaggctgggggaggggcgcccgccattgcccaggcttgattaggtaaacaaagcagcckggaagctcgaactgggtggagcccaccacagctctaggaggcctgcctgcctctgtaggctccacctctgggggcagggcacagacaaacaaaaagacagcagtaacctctgcagacttaaatgtccctgtctgacagctttgaagagagcagtggttctcccagcacgcagctggagatctgagaacgggcagactgcctcctcaagtgggtccctgacccctgacccccgagcagcctaactgggaggcaccccccagcaggggcacactgacacctcacacggcagggtattccaacagacctgcagctgagggtcctgtctgttagaaggaaaactaacaaacagaaaggacatccacaccgaaaacccatctgtacatcaccatcatcaaagaccaaaagtagataaaaccacaaagatggggaaaaaacagaacagaaaaactggaaactctaaaacgcagagcgcctctcctcctccaaaggaacgcagttcctcaccagcaacggaacaaagctggatggagaatgactttgacgagctgagagaagaaggcttcagacgatcaaattactctgagctacgggaggacattcaaaccaaaggcaaagaagttgaaaactttgaaaaaaatttagaagaatgtataactagaataaccaatacagagaagtgcttaaaggagctgatggagctgaaaaccaaggcttgagaactacgtgaagaatgcagaagcctcaggagccgatgcgatcaactggaagaaagggtatcagcaatgcaagatgaaatgaatgaaatgaagcgagaagggaagtttagagaaaaaagaataaaaagaaatgagcaaagcctccaagaaatatgggactatgtgaaaagaccaaatctacgtctgattggtgtacctgaaagtgatgtggagaatggaaccaagttggaaaacactctgcaggatattatccaggagaacttccccaatctagcaaggcaggccaacgttcagattcaggaaatacacagaacgccacaaagatactcctcgagaagagcaactccaagacacataattgtcagattcaccaaagttgaaatgaaggaaaaaatgttaagggcagccagagagaaaggtcgggttaccctcaaaggaaagcccatcagactaacagcagatctctcggcagaaaccctacaagccagaagagagtgggggccaatattcaacattcttaaagaaaagaattttcaacccagaatttcatatccagccaaactaagcttcataagtgaagaagaaataaaatactttacagacaagcaaatgctgagagattttgtcaccaccaggcctgccctaaaagagctcctgaaggaagcgctaaacatggaaaggaacaactggtaccagccgctgcgaaatcatgccaaaatgtaaagaccattgagactaggaagaaactgcatcaactaatgagcaaaatcaccagctaacatcataatgacaggatcaaattcacacataacaatattaactttaaatataaatggactaaattctgcaattaaaagacacagactggcaagttggataaagagtcaagacccatcagtgtgctgtattcaggaaacccatctcacgtgcagagacacacataggctcaaaataaaaggatggaggaagatctaccaagcaaatggaaaacaaaaaaaggcaggggttgcaatcctagtctctgataaaacagactttaaaccaacaaagatcaagagagacaaagaaggccattacataatggtaaagggatcaattcaacaagaggagctaactatcctaaatatttatgcacccaatacaggagcacccagattcataaagcaagtcctcagtgacctacaaagagacttagactcccacacattaataatgggagactttaacaccccactgtcaacattagacagatcaacgagacagaaagtcaacaaggatacccaggaattgaactcagctctgcaccaagcggacctaatagacatctacagaactctccaccccaaatcaacggaatatacatttttttcagcaccacaccacacctattccaaaattgaccacatagttggaagtaaagctctcctcagcaaatgtaaaagaacagaaattataacaaactatctctcagaccacagtgcaatcaaactagaactcaggattaagaatctcactcaaagccgctcaactacatggaaactgaacaacctgctcctgaatgactactgggtacataacaaaatgaaggcagaaataaagatgttctttgaaaccaacgagaacaaagacaccacataccagaatctctgggacacattcaaagcagtgtgtagagggaaatttatagcactaaatgcctacaagagaaagcaggaaagatccaaaattgacaccctaacatctcaattaaaagaactagaaaagcaagagcaaacacattcaaaagctagcagaaggcaagaaataactaaaatcagagcagaactgaaggaaatagagacacaaaaaacccttcaaaaaatcaatgaatccaggagcttgttttttgaaaggttcaacaaaattgatagaccgctagcaagactaataaagaaaaaaagagagaagaatcaaatagacacaataaaaaatgataaaggggatatcaccaccaatcccacagaaatacaaactaccatcagagaatactacaaacacctctatgcaaataaactagaaaatctagaagaaatggatacattcctcgacacatacactctcccaagactaaaccaggaagaagttgaatctctgaatagaccaataacaggctctgaaattgtggcaataatcaatagtttaccaaccaaaaagagtccaggaccagatggattcacagccgaattctaccagaggtacaaggaggaactggtaccattccttctgaaactattccaatcaatagaaaaagagggaatcctccctaactcattttatgaggccagcatcattctgataccaaagccgggcagagacacaaccaaaaaagagaattttagaccaatatccttgatgaacattgatgcaaaaatcctcaataaaatactggcaaaccgaatccagcagcacatcaaaaagctcatccaccatgatcaagtgggcttcatccctgggatgcaaggctggttcaatatacgcaaatcaataaatgtaatccagcatataaacagagccaaagacaaaaaccacatgattatctcaatagatgcagaaaaagcctttgacaaaattcaacaacccttcatgctaaaaactctcaataaattaggtattgatgggacgtatttcaaaataataagagctatctatgacaaacccacagccaatatcatactgaatgggcaaaaactggaagcattccctttgaaaactggcacaagacagggatgccctctctcaccgctcctattcaacatagtgttggaagttctggccagggcaatcaggcaggagaaggaaataaagggtattcaattaggaaaagaggaagtcaaattgtccctgtttgcagacgacatgattgtttatctagaaaaccccattgtctcagcccaaaatctccttaagctgataagcaacttcagcaaagtctcaggatacaaaatcaatgtacaaaaatcacaatcattcttatacaccaacaacagacaaacagagagccaaatcatgagtgaactcccattcacaattgcttcaaagagaataaaatacctaggaatccaacttacaagggatgtgaaggacctcttcaaggagaactacaaaccactgctcaaggaaataaaagaggacacaaacaaatggaagaacattccatgctcatgggtaggaagaatcaatatcatgaaaatggccatactgcccaaggtaatttacagattcaatgccatccccatcaagctaccaatgactttcgtcacagaattggaaaaaactactttaaagttcatatggaaccaaaaaagagcccgcatcgccaagtcaatcctaagccaaaagaacaaagctggaggcatcacactacctgacttcaaactatactacaaggctacagtaaccaaaacagcatggtactggtaccaaaacagagatatagatcaatggaacagaacagagccctcagaaataacgccgcatacctacaactatctgatctttgagaaacctgagaaaaacaagcaatggggaaaggattccctatttaataaatggtgctgggaaaactggctagccatatgtagaaagctgaaactggatcccttccttacaccttatacaaaaatcaattcaagatggattaaagatttaaacattagacctaaaaccataaaaaccctagaagaaaacctaggcattaccattcaggacataggcgtgggcaaggacttcatgtccaaaacaccaaaagcaatggcagcaaaagccaaaattgacaaatgggatctaattaaactaaagagcttctgcacagcaaaagaaactaccatcagagtgaacaggcaacctacaacatgggagaaaattttcgcaacctactcatctgacaaagggctaatatccagaatctacaatgaactcaaacaaatttacaagaaaaaaacaaacaaccccatcaaaaagtgggcgaaggacatgaacagacacttctcaaaagaagacatttatgcagccaaaaaacacatgaaaaaatgctcatcatcactggccatcagagaaatgcaaatcaaaaccactatgagatatcatctcacaccagttagaatggcaatcattaaaaagtcaggaaacaacaggtgctggagaggatgtggagaaataggaacacttttacactgttggtgggactgtcaactagttcaaccattgtggaagtcagtgtggcgattcctcagggatctagaactagaaataccatttgacccagccatcccattactgggtatatacccaaaggactataaatcatgctgctataaagacacatgcacacgtatgtttattgcggcattattcacaacagcaaagacttggaaccaacccaaatgtccaacaatgatagactggattaagaaaatgtggcacatatacaccatggaatactatgcagccataaaaaatgatgagttcatgtcctttgtagggacatggatgaaattggaaaccatcattctcagtaaactatcgcaagaagaaaaaaccaaacaccgcatattctcacgcataggtgggaattgaacaatgagatcacatggacacaggaaggggaatatcacactctggggactgtggtggggtagggggaggggggagggatagcattgggagatatacctaatgctagatgacgatttagtgggtgcagcgcaccagcatggcacatgtatacatatgtaactaacctgcacaatgtgcacatgtaccctaaaacttaaagtataattaaaaaaaaaaaaaacattaaaaaaaaaaaaaaaaggagagaaacatggaatagaaaaaaaaaaaagaaaccctttctaaagggctttttagaaatacattaacatttgaaaaaatatacatattaaaatatatttctgctaaatattatgtattgctattttgctattctttagctcagctataatgctcctaatttgagtaatgaattcatgataaataacattttacttgttaatgtttatatcttgttaatggcctttgaaaatcactgaagtcatagatgtgatataagaaggcaaaaaatatagaagtatatgatgaagaaggtaacagattccctcctctttcagtccctttgccagaaatcatcatcgttaatccttttgtgtttatccttcaacatctctatgtaagctcatttaggtgtgtaaatatcaatatatgtcctcagtcccttccttactaattctaacaaataggattatattgtacatgttattcatcagcttgatttcacatctgccagtattttctgaacagctctctagttgttagagtctagtacaatacatgttatataaacatatataacccacatataatatatataacccactcttattagcagctgtttattcttttgtaatatggatgacctaatttatttagcccctcctctcttgatggatagtcaggttttgttcattaataaagggaatatttcagtaaatatctataaatatatatagtatacaattatttygatttctataagttaagtttacagttttaaggtagaattgcagggccaaagatatatgcatttaagactttagtaggtgctgtcagattactttctacaaggctctatcaagttatgctctaccagcaaggtgtcacaatgtcagggtcctcaaatgctttygagcattgaatattaatgatcttttaaaacttaaaaaatcaatttattggtttttaaattatatgttcttgttttaattcgcatttcctsttttccatgcatgtattcagtatatttcttcctcagcaaattgtccatttctgtccttaggatgctttctaatcttttcctttttaaattgtagggatactttctatagtagggttatttaccatttgtcatatgttttcaaaatatttttcttattctaccatttgctgttgactttatttgtggtttattatagagaaatcttcacattttatgtagttaaatttatcaattatatcttttagggctacccatactcattaatacacacaataaatgtatcattggaatataaatcagtccaaatatatattaatttatcttggtagatgtctacatatgcaattatgtttgctaaatgacccattgtttcttcctaatggcttcttactttctagtcttgttttagaagatatttttctacatttttgttgaattttttttagaacttatttttatacttagagtatttagtcagtgagattctggtaaaaaaaaaaaaagacttgaggggaagactccagggctgaggagccttctggggacagttcctttgcacttcaatgatgcgcgaggagaatggtccattctcacctttgcattttgcttgacgtggagcctgagaatgtggcaggcagcatgtgaccacagggaaaccagctaaaaaggcagctgctatgaaagccgagtaggcacaactgagtcacagctcattttggtttgccccatttgtttattcatttattgatttagtctaatatttttgagcatctgctgagaggtattctcctaggctttgaggatacagttagtaggcaaaactaacaagtctcctgccctcctggacacagctttctagtttctaaagttctccattggtgtgcagtgtgtgcacacatttacatgaagcaaagcttacagagattcccagagcagttgtagagaagaggttctgaaagtcaacataaatattaggtcagacaggagcatcacaaataaatggttttaatccggacgttttgggctgcaagtaatataaatgcccctataggctaacaatgaggaaatttattaactcgcattaatgggaaatccataggtaaggcaccctttacagtttgttgttcagtgactcagtaatcttcccagggacatgggctctttccaaatctctgatctattggcctcaaccccaggctggctctctttgtggtgataaggtgacatttaaaagcaactggggaaacatgctgtgttcacatctaacgggcagagaagaatagttccccagtcatagaatgtaacttttttctttcaatcttttacgtcaattaaggaccgataataactagcagattttcatggattgattgccttagtgcacttattcttaaactttaacgtacttcagtaatgacagtgtatatcagaatcacctggaggacttgtgaaaagatcctgactggcttctatcccatgtttatcattcagttggtttagggttggatcaggaatctgcatttttaacaaattcctcagtgatgccgatattgaaaaccactgatttgcaatgatgaagatgcatccttgcaccacacacctattagaatggccaaaattcagaacactgccacacatcaaatgctgggaggatgtggagcaacaggaactcttatttgttgctggtgaaaatataaaaataggtgcagcctgtttggaaaacaggtgggcagtttcttgcaagagcaaacctactcttactgtacaatccagcagttgtgtcctttgacattcacccaaaggaacttcagacttatgtcaacacaaaaacttgcacaccagtgtttatagcagctttttattcataatttctaaaacttacaagcaacctagaggtcagtagatgactggataaactatggtacattgagacaattgaatatttttcagaaatgagctattaagccatgaagagacacagaggaaacttaagtgtatattaagaagtgaaagatgccaatatggtaatgctacatactgtataatttcaactacggtaaggttccacataacagtctttcagtctatgaggtctgcatataagatggtagtcctttaagattataacggagctgaaaatcacctagtaacattgtagccactgtaatttcatagctaatgcattaccttttctatgtttaaatatacaaatactctcattgtgttacagttgcctacagtattcagtacagtaacatggtgtatatgtctgtggccaaggaggagtggactacaacatatactctccgtgtatagtaagctatcccatctagatttgtctaagagcactctatgatgttcacacaatgatgaaatcacctaaagatgtttttcttagaatgtatctctgttggctgggctcagtggctcacacttgtaatcccagcactttgggagcccgaggcaggtggatcacgaggtcaggtgttcaagaccagcctgaccaacatggtgaaaccctgtctctactaaaaatacaaaaattagccaggcatggtggcatgtgcctttaatcccagctactcaggaggctgaggcaggaaaatatcttgaacctgggaggcagagattgcagtgagccaagatcgcgccattgcattccagccgggagacagagggagactccgtctcaaaaaaataaaaaataaaaaatgaaaaaaagaacgtttctctgtcattaggcaacccatgactatatatgacattctggaaaaggccaaactatggatacagtaaaaaatatcagtgtttgacagaagctgggagaggcagggataaataggtagatcatagaggactttttcaggtagtgaaattattctgtatgatactatagtagtggatatatgccattatatagtttccaaaatccatagaatataccacaccaagagtgaatcctgatatcaattctggactttgtgtggtgctgattgttcgttggtacgatgtgttgataatgtgggaggctacgcctaggcttgagggcaggggattgtggggaatcttcatatgcttcgtgccatgcaattttgctgttaacgtaaaactattctacaagataaagttttatttatgaaaaaaaaagagcctcacccttgagtctagggatggaatgagccatccctgagccacgaactgtggaagactaaatcactgaacaaaatcaagggtttggggaactactggaaaggaagagaggaaaatgaatgcggagtaagcaactgacagtggccagtataaaggttgatatgagttgaatataataattgtagtcaaatgactactgagaaattgggtaagatttatttcttttcttgagtaaatgtattcgtttgttaagtactatcagtcagaattgagatctgcaaagaaacttgctgtttttttttttttttaaagcttgattttaacaataaaaaaggttgattgtgacatggatattagaagatttaactatggggatcaattgtaaatccattcctcatatttagcatggatctcaccttagctccagttataatgaaataaattaataatacctgaattgtttttgttttgttttgttttgagacagagtttcgccctttttgcccaggctggagtgcaatggtgtgatcttggctcactgcaacctccacctcctgggatcaagtaattctcctgcctcagcctcctgagtagctggtattacaggcayctgccaccacgcccagctaatttttgtatttttgtagagacggagttttgccatgttggccaggctggtctcaaactcctgacctcaggtgatctgccttcctcggcctcccaaaatgctgggattacaggcgtgagtgaccgcacccagcttcctgagttgtttagaggatgttggcatgcacttcaccgtaggtccctcacacgtgcacaccttgcaagcagaggcaccgayggcctttgttctggtccagggaacagccttggaatatagagatagtgtctctctctggagcactggatgagctttctagttgtccaacataagaaagataatgtctctcttgagagcaaagggtaggcaggtttgcttactgcccataataagagatttggttttcctaactcagggctctttagctgtgatacaaactgacttcatgtgtagcatcaacttggattcctctgtattctcccttgagactttgggggcaaggggaamcaacaagaacacaaagctcatgttgctttgtgccatgcacaaagctttgctttgttgttcataatacagttctatgtctctggcccaggagtctcctgtcttctgccagcatccatgaaacagtggcaggcaaactcgtaggcttgaaacttgattaagtctcagactcctcacagttctggacagaatatacttgaaagaaaaaaactgacttcttcataatttcctctaactcaaatcttgttgactgggaaactgaggctgggagtaaggaaacgacttgtgcagttttgcagtgcrtctgtttacagaagtgcctggcaaggccactgttaccaacaccctctgataactggtgcctgctcctctcagcgcactttgcttttagcctcactacaaagccagcctctgtgagtctgcccaatagctctggcttagggttgatttaaggatgggattggacagtaagaatctttcacttcaagacagagccagataaaactgacatgaaccaagtgaggtgactagtcgtatagaacatacagatataagctgacagggttattcaacaccgagagatatttatctgccagggtcatttagctgtaactctactaagaactagaatggaaaaccagctgaccatctccattgtttttctattttgtttgcatgttgctgtaaacagtttattttaaattataaaacgggactctatttgaccactaaatggactcaatttgaccattaaatatgcctcgtggcccaaaggatatctagacttagtgaagtggtcacgttaattattttgtctgcaagtaagctcttggtgagcctgccatgctaacttacgaggcgaatgttggtaacactttctctgtttgacacgttagcttggcatataactttttcttttataaagaatttctttgtagtactgtgaaatcataactcttattctatactttatcaatattatacgtggctcttactacataatgatcagtctcagctttaattcttaaaaaggtttatatcataatattaaggttaggatatgaaacattatgaagggtctgtgagcacgtgacagagtattctttcatataaattccaataatgttatatgatttttttttgaaaactcagacatttctttccaccctcagaattgcgtgtagcgacctttaaaaaacagtgcttcaccatggagctgacagaacttagctctgggctccccacctgtattttcactgagccataggcccgtggcaaagaaaattgaatgttgcctgggtgaccttatctataagctgggtctttaatttcattcctggctatattgaagctatagctgttgccaaagtgtctgaaaacaaaagggagggcagagagatgatttctgcagatgatctatgtccagccaactgaggaaatcactgacccgccactgtagagtcctttgttctggccacctttgtctgaccctgtctaagtatataaaaaacacagaagcattcccttctaggatagaatcctggagtttctaagattgacttccaaagacatcaacaatatgggtttctatgtacataaaactatttgggatttgggaggcagaaattacaatagttggcaatttgtaattcttaccgataggttcattggttggatacctttggaaacattttttgaaacgcagatctaagctaaacatctcttttgggcagattatgaatctaaggtgttttatttgagacaaatggttaacgtgttacatgacatatttattagtccaaatgaaaaatactcgttgaaattaaaccttcttttcccaaagatcgtgcagagctcataatatgtatttgcattacatatttttttccaggagtttattctcaggaaacgacatcgtttttaatataatagaagaaatgaaatacaaagtcgaaaaatgagactggaaaagcccaggcactggcattttgtgttgtgctaagtgttccctcgtcaccttgcagtccgctggcagaagtgtggagcggacacaggagaaggctgggatggtgcttggaggctggggaacaggctgcactggcatttccagtgaagtgacttgggacacacttcctctttctgcctgaaaaggactgagggtgaggggccaccttgtcccgccctgggttgatccctcccagatgcccacatctccagggctgtgtcttcagcccagctctcgctcctgcctctgggcatgctggctcctggacaccccacatggattccctggatatctccaactcctctgctctataatgcmsctgagcgtcttactcctcccccttggccgtgcctgtcttcgcagcccamaaaatatttttttctaccagtgtctcttacctgaatcagtacttcaagctgcccactcattttggccagaaacctgaattgcccttgagtctttctactacctcacctctgcaccacatcaatcataaatctcatgtactctctttcctaggtgtcttggtgtttcggaggtttctctgcaatgctgcttgcctagcctcagccactactatggctccttattgcacccatgttcactctgctgccccctagagttgctctaccctacagccagatatctttttttttatttttagtatttttagagacagggtcttgctctgtcacccaggctggagtgcagtggtgatcacagctcactgcgcctcaacctcctgggctcaagtgatcctcccgcctcagcctcccaggtagctaggactacaggcacatgccaccacgcctggctaatttttaaaatttttgtagggactgggcctcactatgttgcccaggctggtcttgaactcctgggctcaaacagtcctcccacctcggcctctgaaagcactgggatcacaggtttgagccactgtgtccagccatcagaggtcttttataaatgcacattcagtcctaccatttctaagcaaaaatggacagtgagagactccttaacacacagctcccctatcctcctccccgttgcctgcttcccgtttctccataattcttctcacagccaggcatgctacatgctgagatttcatgtgttgatctgtctccctccactggagcatgagctggcctggcagggcttttgtctggcttgcttactgtgcctgagttgagccatcgaaggcactctgggaatggaaatgagtggttggcgcacattcccctatcatctggctttggccccctctccatcagttcccctygtttttccccactgctttcttagcttcagccttagcactttcattttcttgagatcaaggtgctcttcctgcttatgaagcaccatgaaggtagaatcacacctcctctcccgctggttttctactactcctacctctctgccccccgcccaccaaccccaccttcactctctacttaaatatcccctcctcagggaggctttccctaagcaatctctggacaatggagtcgtgcattcccttattattttttaaacatctaatatccctgctacactggaagcctgaaatcttcaggaaccatatctgcctgtctatgaatgcacacacagcacctagcctagtgtgggctttcaacagatattttggagactgagtccatgtgattcagtctgcattagtagtgcctaatcaacaatgaatgatcattatcttttcctccatggagccacttacatcaattaaagtgtgaggcagtctcccctccaccccaacccctatacttttcccacctgatcttccaactgaagttctctggctcccatacttgccccggaggaatgactgtgatgtgacaggacaaagtactgaaatatatatgagtatgaagtatatgcagtcatgcatccttaagcaatggggctgtattctgagaaatgcatctttaggtgatttggtcattctgtgaacatcatagagtgtacttacccaatcagaggtagcaaggccagctacacacccaggctatatggtatagccaaggctcctaggctgcaaaattgtagagcatgttactgtattgaatgctgtagactcttggaacacaatggtatttgtgtagctaaacattgaaacgtagaaaaggtacagtaaaaatatgatattgaagataaaaatggcacacctgtacaggacatccaccatgaatggagcttgcaggactagaagttgctctgggtgtcagggacctagtggtgagtgaatatgaaggcctaggacattactgtacaccactgtagactttacaaacactgtacacttaggttacattaaatttatttttttaaatttgtgtctttaataataaattaaccctagcttccttaaacttttgtaccttagaaacgtttcaatgcatttttcattgtttggctcttttgtaataacacttagcttaaaatacaaacacattgtacaactgtacaaaatattttcttttttatattcttattctataagctgttttctgtttttaagtttttactttttttttttttttttacttttaaaacttttttgatacctaaaacacaaacacacattagcctaggcctactctgggtcaggatcactgatagcactggccccacctccacatcctctcccactggaaggtcttcagggggcagtaacactcatggagctgtcatctcccagaataacaaggccttctgctgtctacctcctgaaggtcctgcctgaggctgcttcacagttaactttttttttttttagtataagtagaatgctgtaaaataagtattaaaaaagtatattatagtaaaaccataaaccagtaacatagttgtctattatcattagcaagtattaggtactgtacatgattgtatgtgcttgacttttatatgactggcagtgcagtagatttctttacagcaccatcaccacaaacacctcagtagtgtgttgtgctatgacgttaggacagctaggatgtcactaggcggctggaagttttcagctccagcatactcctatgggatgacagtgatatatgtggttcgttgttgatggaaatgttgttatgtggcgtgtgatggtgtatctttctctgaggtttattgaaagtcaggaagcttctacaaggattgtgaggcctcacattcatgactcagggccctgaccaggccctcctgatagctcctatttggcactatctgcattcgccacgattctggcattctcttccctatttccatgtctttttagtgctgttcactttctcagaaatgccttttcctcctcttttctgcttgtcaaacacatgtactttcatataaagtaggggtccccaaccccctgactgccaaccaggtacacctggctgcacagcaggaagtgagccagaggcgggcgagcatcaccacctgagttccacctcctgtcagatcagcagcggccattagattttcgtgggagtgcaaaccctattatgaactgtgcatgcragggatctaagttgcaagctccttaggagaatctagtgcctgatgatctgagggggaacagtttcatcccgaagctatccccccaacctggttagtgggaaaattgtcttctacaacactggtccctggtgccaaaaagtttggggcctgttggtataaaggaacaggaatgcctgttttactcaccagacagagtctttgccctgcccctgtcctgccatggcactttcaatataggcatttgtctcataggctagaactatgctttttgtctctggctttctcatcattctgtgtaagacctaaatcttacctttttttctcttgtgcgctattgcctggcacactgtagaagcccaggaaagattttaaacatttaagtaactgctcctagttctgtctcaatcagaactaggagcagtcctactttctacttgcaacatatttgcctgtcttctttgccactaaccttcgttgagaaaataatctgtgaaaggtcattatcaagttatctcagcacttatttaatgtgtgtttagctgctttagctgctttactgtcacataaaaacgtgccatagtaaaataaagtaacaaagctgtcaataaaaaccccacttccactcaatatttaatgctaaagagccagagacatttgagattttcatccataatgctaaattgatgttatcaaggtcggtagctgatcaatttgccttgaaatactgttcacttgatgaatgaaactgtaacttgttagaatatggtgtgttctggaaaacaatgtgttttagtattctttacataatagtctccaaataaggtcaagataggaagcagcctcatgctatgaagcacctggtgtttctaacaaagcaagggcagtgatgactgctgatcagccaccatagtcaccaaagagtcaagaaaaatgcaaccaccttcttgagggcattagagtttataaggtaccaccacatccgttttcttacctaatcctcgtaatgattgcaagagagataacagtatcctcattttccaagtcaggaagcttgggttcaaagaggttaaatggtattcagaggtcacacaaagctcaatacaatcccaagtgtttcctgactcccaactgggttctttctgctatgatgtagctacttcattgctacaggactaaaaattgaaaatctgtacagctgtattaaatatttagaaaatctaccttcgtgattaatattttttaatttttttaatttttaatttttgtgggtagtatacatatatgccccatatatatatgccccatatatatatatatatatatatatatatacacacacacacacacacacacacacacaaacccccatatatgtatatgtggggtaaatatatatatacacacatatataattatatatatacatatataaaaatatataaatatatggggtaaatataaatatatacatataaaattatatacacatatataaatatatacacataaaattatatacacacatataaatatatacatataaaattatatacacatatataaatatatacatataaaattatatacacatatataaatatatacatataattatatatacatatataaatatatacatataattatatatacatatataaatatatacatatatatacatatataattatatacatataattatatatacatataattatatacatataattgtatatacatataattatatatacatatataaatatatacatataattatatatacatataattgtatatacatatataaatatatacatataattatatatacatataattgtatatacacatataaatatatacatataattgtatatacacatataaatatatacatataattgtatatacacatataaatatatacatataattgtatatacacatataaatatatacatataattgtatatacacatataaatatatacatataatagtatatacacataaatatatacatataatagtatatacacataaatatatacatataattgtatatacacataaatatatacatatactggtatatacgtatataaatatatacatatactggtatatacgtatataaatatatacatatactggtagatacgtatataaatatatacatatactggtagatacgtaaatatatacatatactggtagatacgtatataaatatatacatatactggtagatacgtatataaatatatacatatactggtagatacgtatataaatatatacatatactggtagatacgtatataaatatatacatatactggtagatacgtatataaatatatacatatatggggtaaatatatatatatgtatatgtatatatggggtaaatgagatgttttgatacaggcatgcaatgcagaataaccacatctcggagaatggagtttccatcccctcaagcatttatccattttaaaatgtacaattcagttattattgatgatagtcaccctgttgtgctatgaaatagtaggtcttattcattctttcatgattagtatttaaagagtaaactttaagtagtgtccaggggataggtggactctagaatagttgtagagtttgaatgtacacaaaccctaatgcaaatgagttatttcagagtcgggatacatttcaaaaaactccaactgactgtccctgacagtgtaaaactttcagaattcctcagaaaagtaaacctttgtctcaaaattatgctttgaagtttgaagataaaaggagagctgtctaaggcccaatgctcaaatagatggactaaaaacattttagaaaaattctggagaggttatcagaatttgaaatgaatgtgataacagatcccctatagttcaagtcctcagtagtgcgtaacaggatttaaagcagcttagctcagactaacgcatacaagaaattaaagccttttacagggttttgaaatgtgtttcattttctcaggaaagagaaaagcagattccttacttttatgtacctggtcacttaggaatattttgtactgtatggttctggtccgttcttagagcaatacagagaaacacagtagaacttattcaaatctgtgattgccagctgttgcctgggcagtgtttcccattgccttttggtgccagaatgagctagcattgttttggtgaggattggaagcctgtgccctgacatggagaacagtacatgcacatccccagccaaggccggtgaatgaaggtgtcatggtctgtgagaggttcagccatagcacctggtgctagagtaactcaacatccatatgcaagtgcagggcaaaattgtgaactaaaatggcctaaatttagcaaatgttttaaaaattggaaaatatctttatagacactcatttataatggaggtctgagttggtgttttggactgaatttgtgttcctcactgattcatgtgctgaagtcctaaccccagtattatagattgtgactatatttggatagggtctttaagaggataattaacttaaaatgtgataatccattatgaatggtgtctttgtaagaagaggagattaggatacaggcattgtacagagagaagaccatgggaggacacagggagaacacatcagcaagccaasgagacagatcccagtagaaagtaaccctgccaatgtcttgatcttgagcttccagcctccataactgtagaaaatgtgcttattgtttaagccactcagtctaaggtacttgtttatggcagccctggaaaatttattcagctggtaaccccaacatggggactgtcagttagacacagcgcttttgagctgtaactgtcctccaaaaatctgtctttaattctctactgcccacagtagatctcttgagaaacaagtgtaaaagtttatgtaaacccttggtcagttgtgtttaaatattgttttagaagaattattcttacagtcagaggaaagttgacttggttatgatgatgttagtgggttgaagctggctaagccaccagtaagggagcaagtggagaaacatttattatctataattgtttttaaattattaataacataagctcttgcttcagaatacttaacgtataacagacatgagaatcagtgactgggggaagattagtcatgaatgtttcttggcaggctccctgtcattccactaggtccatgatctgcggtgagtggagacaaacctacagcaaaccgatctctgttattctcacagggataaaggatggggaatggggacccctagactctccagggcacagctggggctgatggtgaaattaacctgggaggtgctttcatttctattttatctggtttagaaaactcataaaaagtaagtagatttaatatccattaaatcacatctaattttaaaaacctactaaagattaaaaccattttttcagagtcagcattatgattcacttttgttcacagtcctcatggatttattttgaaattttaagtaaacagaaacttttcattctttcttgatatcttcacaaacaaatatgtatttgaaaatgtaaatgatagcaggcacagtggctcatgcctgtaatcccagcactttgagaggggaggcaggggatcacttgagtccaggagttcaggaccagcctggacaacatagtgagaccctgtgtctacaaaaaaaaaaaaaaaaaaaattaaccaggcttagtggcatgtgcctgtcctcccagttactcaggatgctaaggcaggaggatcgcttgagtctgggaggttgaggctgcagtgagctgtgatcatgctactgcactccagcttgggtgacagacctaggggatctgttatcatgttcatttcaaattctgagctagaccttatctcaaaaaaaaaccaaacaaacaaaaaagaaaatgcaaatgatttagagatactttcaatgatctgaagtttttggtaaaattaacataatcctttcattagtttatggttttaaaattaggccctttctaattttgattaaaataaatgaaaagggctttaaaattttttattttttattgtaataaagtatacataaaaatatttatcagtttaaccattgtaaatgtacaattcagtgccattaaatgcattcataatattgtgtaactgtcaccacgatctatatccaaaacattggtatcatcccttactaaagccctgtacttaaaacgacaacctccactcctcccctccacctagtcccagacaacttttattctattttctttctctgtgaatatgcatattctgggtatctcatamaagtggaatcataccatggttttccacgtgtctgacttatttcaacaagcatgatattttcaagatctattcatgttggtagcatatattaaaatttccttacttttagtggctgagtcatattccattggatggatataccacattttgtttattctttcacctgttgatgggcattttggttgcttctaccttttgattattttgaataatgctactatgaacattaatgtacaatatctgtttgatttctaagggcttttgatacaagttagatttaggccccagaaaatgtcagattggagatcaagttcaacataagaatggggaaaatcatctatagagcaaataactattgctaaggttagagaatatagtacctttatttaagtacatattgcttattattattaatacatattcaattaatacttgttggtcwtaggtaagttgtaaattcactctatatttgtttttgtggctattacatttatcctaattaccactgacacaaacctgagagagcagcaatgttgatgggtgtggctaattttttttttttaatttcctagttacaggcaaagtaacaggaaaaactaaatgacttctagtaactggcattactgtaccaaaccatgggcagtatatcagaggcttgcaggttccactgaaatttatgctcaccttgcttccatattgctattattagccccaaaccaccatcttggttcatcttaacatagtgctttatttacagtgcatgttaatgtttatttcttaacactaattaagatttagccatgcctccttgagcaggacgtgtaagcataataagaagcacttctgtatgttcttacttataataagaagcacttctgtatgttcttacttccaaacaagaagctgcaggattcctgtccacccactatgcatatgggatttattcacttcatcctgctagataacctcctgtccccttgttgacttcagtttttctagcatagccaattcttcttggttaacatttttcttaaaacttctggttaacatttttaatgttgaattgatttacttcctcacactttctataagtttccagagtaggaaaaccattcctatattattcactggccaccatctgctctcatactcctcacttcacctctcacgggcctcacctttgctcgcttcttttgtgaagctcttcaaagctttctcttttctcaggatgatgtttttgcctgacattttcttccttcttcttctttttattcttttgagacagtcttgctctgttgcccaagctggagtgcaatggcacgatttcggctcactgtaacctccgcctcccgggttcaagtgagtctcatgcctcagccttccaagtagctgggattacaggcatgcaccaccacgcctggctaatttttgtatttttagttgagatagagtttcaccatgttggccatgctggtcttgaactcctggcctcgtgtgattcactggcctcagcctcccaaagtgctgggattacaggcatgagccactgcaccctgaccactcctgatattttctgaacatttactctttccatctatcctaacactaactgtcatgcaaaatgcaccaatgtctttgtatttttgcagtgtgaagaatcgtgtgtgtttgtgtgtgtgcgctaagtgtgttctgtggtttgattctcctgttccttcactgtagctagtttattttaggttatattctcttaataagaagagactatgttgacttactttggataatgtcataaatagattgctgtgtactaaatggtttcaatgatagtatttttgagtgataactacttacaaatattaaaaatatgaatataaaaattattcaatattcagccaaaatcttttagggttaaaagcctcaaatgggttatttttatgattcrggagttcttcccaaaaggatggcaatgctgattggcattgattcatggagatgaagctcttagccttctgtccttcaggcttaaacagaggaggtatacatgtagacagtctacactgatcactgagacagagaagtgccttctccattcatgctgcctttttaaaagttgtttttttcttcaaggatagactctgtgttaatgtcagcccagttctctgtgtatacatgatggtggggcctgggggacrggggatgggtggattgcaggaagcttgtctcagtgtgccaggttttgtaggtgacagggtgtagtaatggtttcttacatgaatgattgctatagctaatggaggtcttgtgaaaatgattcagattaagcttctggtttgctttaagcttactgacccagtataattgagtgtaattcagtggaatcagtgaatttgtattcttacagttaatagcaatatattcttgagaatgaagaaaccatgaatgaggttcttaatttgcttttctgcatcttccatgaccttaagaaggatttcatgagagcattagggaaacttcaaaaaaattctctttacaaacactttacacctcactcactgttaaacatgatttatgttgataactgtgctaaagtgagaaataatgcaaaataggggatgtcatggttgttttatttaagggacaccatgcctttaaccacctgaggattgtagtgaccttaccagtaatgtcaatggaactattattatttgtgactagaaaatggcttatgactataaagaaaagaaaggagagagagaaggaaagctaaaagaagggaggaatggagggagatgaggtgacaaagaacagaggcaaatctaaggcaatcttcagaagtagtaaagtaaaacggaaatattggtttgcaaggcagtagcacataatagaatcgcagggtctaatttcattaacattcttgcagcaaataattttcctgaatgaaaggaaccagctgcaccaagcagatttatattttcagtagcaacccaatctagcaactttgtgagcatcttagatttggtttagttttaaactaataaaatcttagctgcctgacccaggagagcttkttctcattagtaactgacacaaaggattttgttgattgtccacatggtttctgattcccagaaaaaaatgagcagtgaatgttataaaggcccataagttatgggatgtgagtaggaagccgaaaacttaataggaaaaccataggaaagaacccatcatgagatacatggatgatgtttcagattctcaggagattaacaaagtatctagaggtatttatccaatatgatgtttcttgggcataggaaaagctttttaaaccatcgaccagcctccagaaaaagatacatgataaggtaaagaaagttagtcaaaaagaaaaagaatctgtgactccattaaggaacaagagctactttgtgtaaaactgatgtgtattttcctcagtaccgtgccctgagtgggtaggagagggagttattataacctcattcctgcttccaccagagcacctgcactaaaaactgttttatcttttggggttctgggtatgatcctgtttaacaagatattttgactacaaaagtgtaatttttttttgaactatctgcctatatcattcacttctttgagcatggaggcaatggaaaatcttactacaatcaagtaattgcttcattagagaagatttatccacagaaattgatgagattaagtgtcaaagcattgttgtttcactcagtgcttctttgaggttcagaagtacttcctttgtacacttaaatggcagaagtgagaagccaaacttcacatttgctgatacctctaaatagctttcttgtcatcatcatcagtaaacacacacaggtaggtagacagtagatccagggaccaggggcaacaaagagttgtgcatgaatttgtagtttatttgagaaacaaaacgttaacacacagaaaactggtagtacggtacaggaagtcctaacttattgtcattgataggttctgggaaactatgactttaagaaaaacattgtatatcaaaaccaattttaccataggctaattaatataaatgagttaagttactatgtgatatttctggtcaagaaaacatcaccaaccttcaaaataaagacccaaaaaccttctaatgttaaatattgaaacaaatgtgagctatgtgtaaatgtaagaaagattaataaaaacaagtaagacaattatttattcaatttttggtgaatcagtgaatgatggcagtagtagtagtagtattggtgggttaaatcaaagaatacatatttacaaacaaagttatwatgagcatctgttaccatcctaccaccacacaattaaaaaaacattaatgacatatcrtaaaaaaggattcctggcactgaaaaatttaatgaatgaaataacaatacagttgacaccttcarcagtggattaggtcaagcagaagaaagaatgactaaagttaaagataggtcttttgaaataacccagtcagacataaatgaatgaaaaaaataattttaaaaagaaagcctaaatggcatattggtcaccatcaagtgaacaagcattcaactattgtgaatgccagaggagaagagatagaaaaaagcattgaaaaacctattaaacctgaaataataaaaatttcttaaatcttaaaagagatatagacatccaaatataggaggcttaaagacttctgaatatacttaacacataagtctcctctttgaggcacattatagttaaactgtcaaaagttaaagagagaattctaaacaatagaaagagaaaagcatcaagtcacatgtaagagaattcccatcagattaacagcagatttctcagctgaaaccatataggtcaggagaaaatcgagtgatatattcaaagtactgaaagcaagaaaaagactcctggtgaagaatactatattcaccaaatgtgtccttcagaacgtaaggagatataaagtgtttcctagacaaacaaaaactgatgggatttgtcaccactagactgactatatgagaaatgcttaagaaagacctacatctggaagtgaaaggatgttctccatcaccgtgaaaacacactaaaatatataacttattgaaagagcagatacgtatatgagaaaccgaaaggaatgaaatgttattactacagaaagctaccaaatctcaaagataaacatcagagaggaagaaatgaataaaggatttacaaaacaaacaaaaaacaatgaagaaaatgacaggaataagttctcacctattaataaccttgcatataaacagtttaaatctcccagttaaaagatatggactcactgaatggataaaaatatataatatagcaagacccaaccatattctgcccacaagaaactgacctcacctataaagacatatagattgaaagtgaagagatgggaaaaaataatttatgcaaaargaaaccaaaagtcttcagtagttactatacttagacaaactagaactttaagtcaaaaaacataaaaagagacaagatcagtacataattataaagggatcaattcagcaagaggatataaataacacacacacacacacacacacacacacacctaacactggtgcacaagatatataaagcaaatatcattagcgctaatggaagagatagactccgttacaataacagatggggacttcaacaccaaacttgcttgcagcattagatagataacctagatagaaaatcaacaaagaaatattggacttaaactaccctacagaccacatggacctagcagacgttacagaacctttcatccgacaactgcagaatacaccttcttctcgtcagcacgtggaattttctccaggttacactatatgttaggcaacaaaacatacttccataaatataaaaaagtcaaaatcacttcaagtattttatcagaacacaatggaataaactacaaatcagtagcaagagaaatgttggaacctggaaaaaatatggaagttaaataatatgctcctgaatgataattgagttaatgaagaagtgaagaaggaaataaaaaaatggaaacaaatgaaaatggaaagacaacataccaaaacctataggatttcacaaaagcagttctaagagggaagtttatagtaataaatacctacatcaaaaagtagaaagatttcaaataatctaatgatgtacctcaagaaaccaagaaaagcaagaacaaaccaaataaaaaattagtagaagggaagaaataataaatatcagagcagaactaaatgaaatggagacaaaaatagagactaaaagagattaacaaaatgaaaactttggttttctgaaaagataaaatagataaacctttagctagaccaagagaaaaacagaaaagayccaaaaaaaattagaacaaaaaggagacattacaattgataccacagaaatagaatcattagagactattaggaacaactaacaacaacagattcctggacacatataatcaaccaagatagaatgaggaagaaatagaaaacctgtgcagaccaataattagcaatgagattgaatcagtaataaaaagcctcccaacaaagaaaagcccaggatcagatggctttaccactgaattctaccaaatttataaattagaattgagatggattcttctacaattattccaaaaattagaaaaggagagaattcttcctaactcattgtaatagacaagcataaccctgataccaaaaccagacaaggatgtaacaaataagacaactacaggcatcatcatgatgaacataagtgtaaaaatccccaacaaaatattaacatagtaaatccaacagcacattaaaaagttacaaagactatactttcagggatcatttctatagttcattactagagaagtttctctgaatgggtagagcactggaaaccatgaggaggaggcacagtgttctctcctgagcatgaagctgactcttggtgttgcttcactgcacctgccatgtgccactgatgattgttcttgtcttcctctgggagagtaagacggagagcatgcagtctgagtgcttcccattttattgttgtgtactaagaacagtgtttttgttgtacatgagggtgatagctttaacatttagcaggcaaattgttttgagaacatgtcaagtgagagcttttttcctttgttctttgcttgctgaagggatccttgtggggtgggctgcttggtctgtcacatggctctcaaaaatagtctttctaattccagtattccttggtttttctgggcttctgaaggtttttactatgtagtgatttcagaaagttcattattgcttagtctgctgtgtttagttcycttcaaggttttgtaaaagagacaaaagcttttatttcttggtaggtaaagcatgttgaagttatccatttactctttttttcctttttttctttcctttctttcttaaaaaaaaaaataaataaacaccatgatcaagtgagatttatcccaggggaaaatggatggttcaacatacgcaaatcgatgaatgtgatacactacatcaatagtataaaagacaaaagtcatatgatcatctctataggtgcagaaaaagcttttgataaaatttaatatctcctcatgataaagtctctcaatgaacttggacatacctcagaattttaaaggcaatatatgacatacagctaacatcataccaaacagaataatttgaagcttttcctctaaaatctggaacaagacaaggaagcccattttcaccactttcattcaacatagtaatggaagtcatggccagagaaatcaagctagagaaaaaaaataaaagtctccaaattggaaaggaagaagtcggattgtccttgtttgcagatgacatgatcttatatttagaaataccttaaaaactattaaaaagctattagaacatgtaatcaatttcaataatgatgcagggtacaatatcaacataacaaaagtcggtagcatttctatacctaaacagcaaacaatctgaaaatgaaatcaagaaagctatcgcatttacagtagttaccaaaaaaaaaaaaaaatacctagggataaatttaaataaatgaaagttttctacagtgaaacctctaaaacactaatgaaaggaattgaaaacaccaaaaatgaaaagatattacatgtgtatggattagaagaattattaaataatattcttaaaatacctgtattacctaaagcaatccatagattcattgcaatccctaacaaaatacaaatgacattgttcacagaaatagaaaaacaatcctgatattcrtatggaaccacagaaaatcctgaataaccagagcaatcttagcaaaaagaacaaggctagaggcatcccactacctgatttgacaatatgctacaaagctataataagcaaaacagcatggtgytgcataaaaacagacacatagaccaacggaacagaagagaacctgttaataaatctacatatttatagtcaactcgtttttgataaagscttcaagagcatacgatagggagatgacagtctcttcaaaaaatagtgttaagaaaactggatctctgcatgcagaataataaaactagacccccatcaccaaatataaaactcaaataaaaatgatgtagacttaaatctaagaytgaaactatgaaactgcttaaagaaaatgtaggagaattgatttggtacatcattggtctgggcaaatattttttgttaaaatattgaaaacacrtgggaaccaaagcaaaaaatagacaattcagattttttaaaaagctgcacagcaaaggagacaatcaagaaagtgaagagacaacctacagaatgggagaaattatttgcaatctatccattggataagtagggattaatagctagaatatatgaggaactcaaacaacccaacaacaataacaaaaatctgattgaaaaatgagccagtgacctaagtgaacatttctcaaaagcagacattcaaatggcctgcagctgtacgaaaaaaatgctcaacatcaccaatcattagagaagtgcagatcaaaaccacagtgagataacttttcatcacagttaatgtggctattatccaaagaaagttataacagatactggcaaggatgcagagaaaggagaactctcatgtcaatgttggtgggaatgtaaattagtgtagccattatggaaggcaatatagaggttcctctaaaactaaaaatagaactactgtataatacagcagtcccactgctgggtatttgggtatgttgcaaaagaaaggaaataagtatattgaagagagatttgcactctcatatttattgcagttctatttacaatagtgaagatacggagtcaacccagtgtccatcaatggatgaatggataagtaaaatatagtgtatacacaaaagaatattattctgccattaaaaaatgaagttttgtcatttgaagcaacatggatgagcctggaggacattatgttaaattaaacaaggcaggcacagaatcacaaatgttacaggttctactcatatgttggagctaaaaaagttgatctcatggagttagagagtagaatggtggttaccagagactgagaagggtaaggggttggaagccccaattaccctgatttgattattacacattgtatacatgcatcaaaatattacatgtactccacaattatgtgaaatttttatgtatcaatttttaaaaattaaaacatgacactattaaaagtactgcrtttattcctcatgaagatatttgtggactaataggaaaaaagcattaaatattttaaatatagaaagaatattcatatagtgaaaaaaattacaaatatggcaggctccccaagtacttttatacaacwtttttttttawgtttttttgagacaatcttgctgtgttgcccaggctggagtgcagtggcacgatctcagctcactgcaacctccacctcccgggtttaagtgattctcatgcctcagcctgctgtgtagctagaattacaggcatgtgccaccacgcctggctaatttctgtatttttaatagagacaggattttgccatgctggtaaggctgatctcaaacttctggcctcaagtgatctacccgccttggcctcccaaactgctgggattacagatgtragccactctccctggcctgtatagcattatttattgtgcatttggatgattattgtatactttatgaatttttataatttgtattcattccttttccaatctgcttattcctgcttagcatcacaagtagtcagagcctatattggcagctcaggacacaggtgggaaccgccctggacaggacgcctttccgctgcagagtgcactcacatagccccacactcacttacaatggaacacttgagagaatcccattaacctgtcatgcacatctttgggatgtgttaggaaaccaaggtacctggagaaaaccctcacagacatggggagaatgtacaaactccacacagacagtggcactggctagaaattgacatatttttctcatcggtgttataaccagatgacatggagtgagacagtgttattgagaacctggtatataaccagtatttaccataagagtcaagtcaatgatacagatgatagtatcagtataggctaggtgattggggtgagtcctttgagaaagcaagccttgagctgggctttctggaaagaaggtacaatccttctctgagcagaggcaagtgggatgggatgctaggcacagaagacagtactgatgacagtttgcaggagggactttcagttgtttaggagatagtggtaaggtattaggttggtgcaaaattgacaatggcaaaatacacaattttgcaccaacctaatataatgtgttgatgctaattgagcatttgttttgaaagagtagtaacagagaaggttccaagatagacagatgctcaaatgtgggaaaattattgtactagggttctccagagaaacagaaccaatatgatatgtgtgtgcacacacacaaagatttattataaggaattggcccacatgtatggaggctggcaagtcccaagatctgcagttggcaaagtggagaccagaagagcctgtgctggtgtggttccagttgtaaaggcagcaggctcaagacccaggaagagctgatatttcagttcatgtctgaaggccaggaaaacaaaaagaaaaacaaaaaacaatgtcccagttcagaagcggtcaggcaaggggaattaccagtctctttgttgtattcagccttcattctattggacaaggcccacctgcattagggagggcaatctgctttgctcagtaacgtgatgcaggtgttaaactcacccagaaacaccctcaccagaaacattcttcaccagatgtctaggctgcctctcaccttgtcaacctgacacataaaatcaaccatcagaatcatgaatgccaggaatttacatttaaattgtagatagttgaatatgatgctttatttaggcaaaagtccatagttagataaactgtcagcagatacatttattaaggtggcatgtgtctgttattaatcatatcaatttgtttattcccctcttttgatgtataatggtcttactgtgtgccaataagtgaatatataaaataatatgtttggatttctacaggtgtatttgaataacagaattctcacttgggggcccagcttcaattcatatttacatgccaagataattgttgatgttgtagagaggtgcttagttaagcaaagagatgagcacatctaaaatcaagctgggaataggatccttaggaataaatatttatgttcacggacattagtctaaagtggcatctttaaacctaccttttttgtgtgtgatagaaacatagagttacaccttatggtgaccgcctcatccatttcacaccatatatcatgaagtcacaagaaaagaagaaaatcagttctggatggcagtgcagactaaatgttctttcataggaagtcaagaaagtagcttttacaattgccaacgtttatgtgcttttccaaagacttgttcacattcttctccagcagtggcaggcacttgaataaactactcaatttggaacatagcaaatgacttcctggcctatgaagaatggtggtggcaataaatgggtggaacattgcaggcacctaggaaagagagcaccatttctaaaatgtttagtgaaaatagcattttcaagcaaactggaaatgtctgattgggggcagaagagtgagcaactgcagctttgaaggagagcagggtaacatgctacattcagcatgtgcctgaagtcatgggtccagcagctgtaccacctcttgctgtctctgacagcattggcgaggggtctgaattcgttgcaagtctctgctgagaagggctggcacatttctttcctgtgtcctctgttaggggatagcgatagactcctcgtaaactccaggatggagcctagttaggcctgtaagtgctagtgtctttgctgacagaattgctgagataattactgccacctcctcagttttgtgtgtcacaggccattgtccagttatggtttctctgaagtgaaatttggtgcatgcgaatgggtgtgtgtgtatctggctcgaaaggtggagctgctgagagattggactgccactcaggctaaaggttttctggtgctagacaactggatgaaaggtttgtttttttttttatttgcccctccaccagcctagatacacactggcttttgtgactttatagagttattctcaggtatgtattccaaaactagcaataattgtgaagtgattccaagaatccagtagttaagtctgtatggctcccaaaacccatgtccccttctctgcctaatcttccttaataaaaagccagttgatagtttttctttgctgagctctagcagccagttggcctggtgagattgaataacatcaggtagccatgtcaggcgtttggaaagcctacaggcagaaggcagtaagaatggtcttactgaacacatcatattctaccaatgttaagacatagatttatggcctctagcacaacattcactgtcagcacctgctgtgtgtcataattgatgtttcctttggtttccttgaacagttctgcctcagctaatgccattaagtttcagaacttaaaaagagttattgttaaatgtggaaaactgctcctgattattttggccattagaggaccacgtgagatgagatcatagaaaaattgccggtaatccatccactgacattcacactctatctagatttatgaagcactcccccaaggcagaaaatgcatctggaaagagtgcctaatagacatttaggtgtctggatgctgaatagatgcatatatgcatagtttctccattttgttatttcacttctgtttctaaaaaccttgataacatttagaagcaaatgttcagaagggaatgaaggtcctgccatcaggacaagacatttgggtagtagagcacataattccttaccaggtatgatttgacctgaatgcatgctagctcttgagtaggttagaagtaagcaagacttgaaacaaagcaaaagtcagaaccacaggcagaaaagacataatgtcacatccttggatgcctggtatgagaatgcagaatgttggcaagaaagatccatgactctgggagaagatggggaccctgttttctccaccattgtgagaaccagctctgcgtattctcctgtgtccgtgattgtcacagggtggtctccaaaccagcaagcatcagcatcctggagaatgcagacgcccaggctccaactcagatgtattgaatcagaaactcttgagtggcaagacccagcaatcttgttttaacaagtcttgctggtgattctgatgcattttaaagtttgagaaccaataaagtatcatccccaacagaggtggagtaaagtggatttcacagaacatttctccgtgattgcaattctcaggctgagatggacaagaaatgctgatacatctctgcccactgatttgacaacttgagagactaatgggttttaggagttcttattttttttaattccaaatgtttcgttttgattaaaaactgaaatatcaaagaattctctaaaaattctctattaggaccamaaagatgaaatatacaaaacagtctggcatttgcttttgtgctgttacccagagtgtttctcattttgccatggctgagaaaaagtgttggtgatatagtttggcagtgtccccacccaaatctcaccttgacttgtaataatccccacatgtcaagggcggggccaggtggagataattgaatcgtggtggtttcccccatactgttcttgtggtagtgaataagtctcatgagatctgatgattttgtaaatggaggttcccctgcacaagctccctcttgcctacggcgacataagacaagaagtgcctttgcttcccaccatgattgtgaggcctccccagccatgtggaactgtcagtgcattaaacccctttcttttataaattacccagtcttgggtatrtgtttattagcagcatgagaacagactaatacagttggcaaatttgggcatcccatttccagtatagacaacagaattattctccagatttagaaagagagaggaaggtgcctcagccagggcatctgatgactacacttgcagaagatggtctgagcaccgtatcacatctgctgaataaagtacggatcagttccggtcctcatgttaccttcaagattactaggcaaaaataaagtcatagctgtggcttaaagccttaaactaaattctgggagttaattacattatggacacgaatgcttttaagagattgtgtatttctttgcatctgtataattgcatcattagttcaacagcttcatttaatgcacatttgagggcctattacatacaagctggcattccttacctgctctcctagtgttgcctcttggccttctgtctgtgaccattctacttaaagaaacttagggaagaaggaagataaatattcgctttccttttcttggccatagaagcaccaagttcagtcattcatttcaatgggagctgagtgcattcttccagccctcaaaagcacttaaacttttctgatggcccagtgttgactatgtggaaattccacgtctctgaaaggaaatggaaatgcttcctttgtggactgacctattcaggaatttcatagggcctcagagaacatgacagagggggaatctcagctgtgcactgaatttctctactccaagtcactttctctgattgagagtgcgctgaaaattgttttgaaaaccaaactgaaagcaaccacttacttacagtaagggttgagaggggcatgttggataagacccttatgaaagggatccatagaatcactgtaattttgcaattcgtggatctagcctatgtttttatgtaaactgtgtgtgtgtgccatgtgagtaatgtctgccttatagggaattgcgtagaaaaattactcaggcaattcaaatggataacatttggcatgagttctcatattttgactggctgtttgcctgcctatctagtgaactttaaaaaaaaaaaaagaaaatgttctaacaggcttggaactgagtttgcaaagataggatgggcccaagttagtattacttgcagcccccagtaattcagtnnnnnnnnnnnnnnnnnnnnnnnnnnnnnnnnnnnnnnnnnnnnnnnnnnnnnnnnnnnnnnnnnnnnnnnnnnnnnnnnnnnnnnnnnnnnnnnnnnnnnnnnnnnnnnnnnnnnnnnnnnnnnnnnnnnnnnnnnnnnnnnnnnagcccccagtaattcagttcagaagatgactgacctctggcatgagggatgaaagacataatgagggaaagccgatggcatcaggaaagggagcaatgtttcaacagctattaggctggtgcaaaagtaattggtaatggcaaaaaacacaattacttttgcaccaacctagtaattgctatagattgcacgaagccagaaggagccaggaggagagcttatggggggccctgtggctcgtgccacaagttggaataaacacagaatcagatcaaggcaatcgccgtttaccctacttttactgaaaatttgatttctttttttatttacttaaggattgaatttgttgctaactcttttccctcaaatggttccccctcacccatgcatttcagtgaagaatatgttttcagtgcatataagtgatgacaaaatttgcatttctgtagactccagctgtctggttatgtaaatgatgagcatacactatattgtattttccaaaagcacatgtgcagcttgtatagctaagtgttaaatttatttcagaacttatttaaagaatggtcctttgggcatggctggtgaatggttgcatggaaaaatatactcaaaggcagggcaacgaaactgtagaaaatgtctgtctcaattaaggaatgccctttgatattcaagtcaactgtgttacaaataaatcaaaaaaattcataaaccctctcaagtagagccatctgatttttatacgtatataactaaaatatcttcacatattacctcttgtctttatcctattaaaaaacaaacaggctctcttcaaagtcacatctctgggaagttcttattttctagttctagctttctaatgcagaaatattgcctcactttgatacacacctttatctttttcaaactrcttttacataagtaatcccatctaattcccagatcagtggttgaggttgacatatgcccattttacagatgggtaaactgtgattcagaaaattgaaaactccttaaattgtatagcgagtgaatagcagggcccagattcatatccaagactcttggccccacctccagcagtatttttctttgtgcagtggtgccttttttatcacctcaggggtgacctcccctgtcccaggagcctaatgtccctcagggctgctcactctcttcccctcctctgattacagttctcaaaggtcattttattactattattacacagctgacactcattttatacttaaatattgcctcaatctgtcttttgtattttaagccttttaatttctaattgtggaataagtagtcttttttcctgattaaaaataattttaagtgctatattagagctggggacatccttcagaaaatcccctgaatcacagaggctctgtggagctccacgtgttaagcgggaacctaatttatttggcattacagtgacgtagcagagcaagaggtgaarggattcatgggttgcctgatgctgctggagcccttgtgagggtttgtcggagcatatgaacttgagaccttccaactcgctgctgttaagcctgctgcctgtcagctcaggttgatctgtgttgtggttagtaattaagataaatctatttttgcatagctaatagctactgctctgtgattactagctcatatcttctgtcccaagtaaacatttataaatactttgaagacatctcagtgaaatttaaatttccttataaaacttcattttaagaataatgggcctgtatgctatgcatagccatgatcagtgtttccatgagtgagagccacatgagttacagtggccctgttcgcataataaatgtttagcaggaagcatttgcatattacattatgaggcttcctttctggycttcctgtgtaatttatcacaaactttgtgagaaaatacttgcaccaaaggcatccttgcacaaaacarcacaggtaaaggaggcttcctcctcctgcttctctcatcttttggcttttcccgggagtggaattggcatatttcttgccctttctccaggaaaccatgggtagaactgggaggatcttatattcccaaaaccatggcaaccccagacagattcaggattttagaactgctgtggtgtgctgggtccctgacactgaagcaccagtcacaccaaacactgccacagttctttgtcttccctggtgtcacccagaacactcgtgtgggtttgcaaaagatgcacaggcaaagtggccgcttgttgcatctaagtgtgggttttaatgtggattttctccaacaagtcatttgamtccattcgagattctctgaagtcttattttaggaaattacctcagttagataacaaatacatattattttgttctcaatattcctaagagtttaatttccatttcacttctctgtaggatacttgtcaactctrtccaaaaggtaagactagatctgtgctcctcccagtgttaaaccgcatcattccctctagataattatcctttgcatagcttatctaaaccaacctctcacttgctgattctgaatctcaggggtaggacctaggaatctgcagtttcacaagtgccagtggtttttatgatcagacaagttgggtaatggatctgtttcttgagcaaatatttgttagataaataccacctttagttttccctactaacatacgcttctcaaaacacttggtacctgcgttctatctctaatattggaacattctttattattattattattattttcctttttgcaggcaggtaagagaatcatgtggatcagattgtgtcccttccaaaaatccataaagcaatccagaggagcctcacttacttgctaaagccctttacaaattacaaagtgttgcaagttatttttatgattagggaacattctggaatcagtcacagtaaatagtttatctctttttcaaatgaaattaaagcacagcaaaatcaagtgacttgtctaacagtgcccagcaagccatcagtttgtaacagatctaaaaggagatgtctgaccactgttcatcccgatctaacaagcagtaagatactggaattgatcaaatgtctgagacaccgtggttgagacccactgttgtaaagcatggagatagctaacaggatgaatcagtggtgggggcctctaggttagagagtcagtactaaatccgctcttggccactgagggtctcattccaaacatgggaatgataacattggatagaaaactatatgttaaattatttcatacattgcaattgtttctggtggtagattcttatctaatagttaaaagacgttaggagaggaatcgatcttttttattcattgagttccccttggtaagtgcgttcctgcctgggctggaaggtgccttcccgcttgtggtgctgtctttatttttaaagtgacagcacatctttgcctattttttagggtacattgaagacctgggaaatatttctgtggaaattattcctgaaatccctttgaagtgtttgcactttggctattgtgtgaagaatggaaaatcgactgaagtggcattgggttggggttagtgcctgtgtaatcagatgctaatgtagctgccctgctaccagccccatatcacatcctcctcctaccacttaccataaaattgcagaggatcagctgtgtacagtaggaggtcggcagttcagttctgcacaatgcagaataaatcactgagaaatcaataaacagcagctgacaagaccaactataggaaaattaaaggctgacgaagaaggtcggggaaaagtttgatctttcagcttaaaaatcttaacagaaaaatccacttttttgttttatattttaaaataaaaggtctttacttattgtttttatgaatagataattaaagaatgaaaagaaaaaagcgttccccatcctagctcttgaatgccttagttcaaaacttaaataactagtgatgttatttatttgtactttgggtgatgtagggttcaataatgtggttggttgacagagacaaaataatgaattgttctctttgacttcctgtagctttggatgtgaatgttatttttccttttctctaaactttttggaggcttgcttaaagaaaagtgttgctgcaggaagccctgactccctggtgcttaactccatagaaacacgcacgtgcttagagatccacactgacctcgctccctccagacgccatcattttggtgcagacattattcagcagacactaggaatatgaaaagatacaagagctgagtcttgaccatttggagttcagagtctagaaagagaaatcctgagtaaatattaagtgcttaataacactgtaaggaggcttaaaatctggtggctgaaggtcctggcttgaagacagtttaatgctcaagcccctcaaaggagatgctgtagttatcggtggccacaggagaaggcatcacagagggttggaaacttaagctgagtttcgaagggcaggcagttcttaagtaagcgaggaggagagagcaaggacatttcaaacaaaggagcttctccgatatagcttcatcttgtgtgctgggtgagaattaacagtgctgtatgtaaggtgtggagtacgatgcctggtttgtgaggtgctcagttgatgttagctgtcattctgaaggatgtggctaaaagatgaagcttctggagacagtgaataaggcagttataccttattggcttccataactttttttttttttttaccctgaaagcctgaaagagcccattacctacttaacttggagtcctgatttttccagcaactagctaagaaactaaatgaatcactttggccgagcgcggtggcccatgcctgtaatcccagcactttgggaggccagggcagacagatcacgaggtcaggagttcaaggccagcctgaccaatgtggtgagaccccgtctctactaaaaatacaaaaattagccaggcatggtggcgcacgcctgtagtcccaactacttgggagtctgaggcaggagaatcgcttgaatccaggaggcggaggtcgcagtgagccaagatcgcaccactgcactcyagcctgggggacagagcaagactctatctcaaaaaaataaataaataaaaaataaaaaaatcactttttgctttacacctcccttttcttccatgtaaaatgtgtcagttggactaaataatatctagtgtaccttccatttggaaatatagtaaatttactttgctataatgaatgaaagaaactagaactcgagataataaactatttccctctttttttcctgagtttcttttttaatgtgaactgtaatacctacctgaatataaacttactttacattcctactaatagtaaggcacaaaattatttgggaattaaaatttaagaacagacatttaggttagaatcagatgggtatttcttatatgtaagtatctgttccatcctgaaataaagtagaaaatcttagaatatctatttttagaagtgttttgtagtatttgtgatttctgtaatgggatgttatacagagacatgagtacatcctagactaggtgactttttagggttgctttgtgatttataagacaactccttgttgtcttcctttttcctaatatcattaccaaattaattttcctaaaatctctttggtcaaggcatttcctttttcaaaagccttcggtgactttttgtctcccaaggtaagtacaaaagtatcttctttgtccagattttcatcattatctcatactatttccatttatgaaatttctgtacccatcagtatggttgactgccagacctcagaaatgtcctgttcccyaaaccactgagttttgttttcatggtctcacagcctgcccaaaccttgtccattctgaaagacccagttcaagaaagaggattcaccatgttgaaaacagcaagaattgagaaacaaatgttaaaatgttcatattgtgactgcccaggctgggtggcagcacaggaatgggggcaggtgggttaaggaggatggaagagcccatggacttggtgagatggagggagagacagccttgcacatgggaggctgaggtcagggagggtaggatctgaatttaaggaggtggcatactttgaggctgaaggtgtctttgaaaaccacaggtcagaagaagaggcagggaaaggaggtaaaattctttgagccagattcacttttaaagtggcttatagrgatacaaagattatagactgcaggagatgaaagacaggagaaggaggtgagcttcagggtagattcattgggaatatgtttggatgtcatgaagataatttgacaacagaatctccttgaatgtggtgtaaaacaaaaataaagcaaaacatataagaggcattgatgaacccagcccaagatcctttcctgtaattcaggatatttaggatgaggaaagtattttgatttaagaaaatctagattggaataaatggagtgtctattccggacagaacaggctttcccaaaagagggactgttagggcctgaagagcagcaaaggatttgacttgggttgaaattatacaaggacagatagaagagagtagataaggtatactcaggttagagggtagattggagacaaatgttggcagtggaaaaccgcagctgaaatatcaatgtcccaaatctctgaaacaggacctgattgctgggagggtgcaggcaagcagggactctctcctggagagggaggactgatgggcacactttctgatgatcattcttcacagccatcaatctctagccctctgtgccagtcacagaggtttcactcttcatggtttcactacattcccgtttcttttaacccatatttaggctcatttaaatatttgatcatttttacttctgatacttattcattgctctgagtcaccctttgcccaaagcaaactgttgtagcctagaggggacttttgcagaaatatgagacttgttacaatgattccctactcctgtctttccagcctagctttccaatgcaaaggcagactttagagtttcacccttgcagctattaggaaataactgcccaagaaaattatcacaggtgacatgcagaatgcatggtggctaattagttcaactagaatatcaagaatgaagctcaaggtatcatgtttataacacagctaaggacaatttgatgttacctgtgccttttagaagggatccctccttcaccttgaaaaggaaaaatacgaatttattagtacttaccttaaaatcatttctagtaacatgaccaaattatacgtatagaaataggtataagttgaaatgtttccttgcacattttttccttctcatagttcatccctcctttttgtagagaagaaaaccaggatttgttgccaccgtggtttccctttctgtgtttctggttactctctagtggaccyatctgtgtggtcacggttctgcaagttggagagacgccactggggggcattgacctgtgctacttgagcactatagtgaattctcacctttttcaaagtagtaattagacctctggtagtttgtatttttagatacataatttcctttattgattccatacaactttgggaaatagtacatctgcttttattttaaactgaagagttactttagaaatgccattttttgtttccagaggctctaaaggattttcatttctgtgacagatcgacaggccatgaagattttctccagaatggtaacttggcatctgccaggaccttcctctggctttcttcagccttctaattacaatcatgcctcgatgaaggacagggtaccttgtgagaaatgtgttgctaggcgatttcatcattgcatgaacaccatagagtgcacatacacacacctacatggttgagcctactatgcacccaggctatgtggtgttgcctatggttcctaggctaccaagtcaataacatgtgactgtactgagtactgaaggcatttggaacacaatggtaagtatctgtgtatccaaacatatttaaacctagaacaggcgcaataaaaacaaggtgtaccatctcatttgagaccaccgtcatatgtgcggttcattattatacagcacatgtctgtatattatctttgtcattttgtgaaaacctgtcactttgaaatgctgtctcttagcaaaagggatcataattcattgaattttttatttttcaaatgaagtgtatttttttttcatccagaatgtagactagtgggaaacacatgaaagagctggactactcaagggtgattggcagtggcctcgtgctgcctcttgcastggggagggtggaggaggaagagtggtagcaaaaggccatttgctagcccaaccctgtcctgcagggctcctgtcaagaagggaggggaagatggaggaggacttcagttaagtaagtcccctatcttggtataaacactattcttagggacttcatgtttataaggacaggttcagtttcaccagcataaaaaccttcaaaaagcagtatgaaaatagtattaaataataaaaattttcaatttgtttgaaaataaaaattttcaaattggttcagaaaatattatgaaccaatctgttttagttaacccttgaacagtgtaggggctggggaaccrcagttgaaaattcacgtctaacttgtggctccccaaaaacttctaatggcctactgttgaccagaagccttactgataacataaaccatcgattaacacatattttgtatgttatgtgtttcacatgctatattcttatgacaaagtaagctagagaagataaaatgttactgagaaagtcttaaggcagagaaaatatatttactattcatcaagtggaggtggatcttcatcctggttgtcttcaggttgagtgggcccaggagtgagtgggaagttggtttggctgtctcaggtgccagagatggaggaaaatccacatagaagtggactcgtacagttcaaatctgtgttgttcaagggtcagctgcacagcctcctggggtacataccatcccctctgttggccactgtgaaggaggaacgccattagttcaaggataacagggtcagtttgaaatgaccatgtactcattttggggagaaaaatctatttgagcttgtcaragtttttctgtagcttcaaaaatatcaaactgtaggagttataaaactccacttttagataatatacttcttagcattaagaatttagaccttttaagaaaaaagtatgaatacatgttttaggtacagagctcttttacatccattagtgaaaattatatctaaacatatcatcccgaaactcaagatttcatcataaacaacaaattcaagttaaaatgaataaacctaaggtttttagcatgaattccagttttttctctcttttttaaaacagaggcagtataagaataatgagatcttattttggtttgcttcatttaattaggatttcaggaaattaggtaacttttttcatgacctttagaatacaaaaaattaatattcggtcaattttttgaaaaaaatttatcaccaggaatttaggcaattaaactttaaaaaataacatgcaaaagttaaagcaatttagaaagccctttttaagcaaattatttggtttttcatgataagtaatcttttgactgaaaatcttatttttcctgttttgttatttcaaaggtttttttgtttgtttttgaagaagtgacattttcctggattagtgaattgttaaaaagtacatcctttctgtctccattttttccctttcttaaacaaagcaaacatttgtatactcacacactgaaggaaaaaagtgcaagtgttataagataattagaacggttaggataattgccttttatggatacataatgcttcagttgtttactgctaaatgaaatgtaaaagtatatattagactaaggaatagtgtacaaaatagatctaaatacaaaggaaattgtgttctgtctgaaaatttgtagatgggtctaaattaacaagaataaattaagaaggatatatacacactcatttatacccttgtgcgtatctcacatatgtgaacacacacaccaaatacactgaaatgtccatatttagtgccaaaaattgtgatgaaaaaccagtgggattatcctttgtaatagctcattctttaagttgcatttcaataaggcattgctgtgaatccagaggagattgtcarttacagaatttttttcatgatctagtatttgcttggtgcctcagagaaaatggttgttcatctctgcccctcactgttcatgtttgggactattgtttggctgcgccagtagaacttattctgataagctcaccaaatttcaggagtagcctcctttcaataactccacacttgtgcatgtggcttagtgaacttactggtgactcagtcatagcaagaaagggcatctcatgtctatgtgactacaaatatcagggaacagattctccatcaccaaccccaacctctaccctaacacaaaggtgtatgacaaaatgagacaaaatgaaacaaaattgctccacatgctacagtggcctactgttgactagaagccttactgataacagaaacagytgattgacacatatttttaaataaatataatatttctctagttaggttttctatttcattttattttaaagatgacaaaaactaaatatgcttctcaaacctctacctttttcaaattaagtgaagtcttcttctcatttaaagctgtttatactcaatttgaaatatgaaacatagcttcaaatccaacaaagagaatgttgctaactctggataacacttggggacttgagtccctgaaaggctgattgacaaccagattgacaactctgattgacaaccttgcttactttgrtagggcttactatacttagtatgatagtttttaaattaatttagagcagaacctttccaagggatctgtgacaagaatggttaaatactgaagtgttgaagaargaaataatttatcctgaactttgaaagtgtattattactaatgaatttaaagataagtgtagaattgatcatttatcatttttaaaccttttaaattagaattataatgaaaaatgcactccccatcccacacacacaaaccccaacaactctttaggtgcctacaggtaggaaaaattgcatttatctgaattaatcttggagtgaatactaaagttagttggaaaagctcctgaaatgtatgagacctcgaaatatcaattaacaaaaaatagtacctaaaatgtcttctaagaagtgtagtcttttaactaggatccttcttcctgtgtaaacactgaaatgaaattttggaatgaacctaaggtggtcctgaagtgctgtgttactagaaaaagatataattggtggaaagggtggrtggatacacaggaagaagcaagaacctgaactcctgctggctgatggaagaaaatgggtgatcaagtttttgcttctgaatatttgacataaacatcataattaacctcacctaaagaaaacttaaaaggccaggagtagtggctcacacctgtaattccagcactttgtgaggctgaggcgagtggatcacttgaggtcaggagttcgagaccagcctggccaacatggtgaaacctcgtctctactgaaaataaaaaagttagccaggtttggtggtgcatgcctgtaatcccagctactcgggagaccgaggcatgagagtcacttgaacctctcatggcggaggcggaggcggaggttgcagtgagccaagattgcatcactgcactccagcttgggtgacagagcaagagtctgtcaaaaaaaaaaaaaaaagaaaaaaaagaaaagaaaacacaagaaaaatatttgagagtcctcaaagctttgtataaacacattctttctggtacattcaaaaggaactgatttcagattggtgtagggcaaagcagaaagtaagtgtgtggtcacagaaatgaaaggacaagagagttgacaagagttacaaaagacagacaacagatcattaacattgctgttgatttaatttggtcactagaaatgcggcattcatttttaaaagaacgtctatctatccataccaataatctggagatgatcacactttccaagcagagagctgaagtgaaggcttgaggggatgcctctgcctctcttcattttctttcatctacatggctgaccaatattcacgcattaatagattttggtttctctctggttccaacatttacataatacagtaatagttataggaaagggtttgcatgttcattatataaacccataccgattttttttctacattcatctataaattacatacgagtggggtagctctatttcttgctaattcctgacagtatttattttaagcatgtctttaattcaaagggatcaaatatgttataaggaccacgtatttattatttcaggtgttttacacagtatatcacattttatccttaaacacatgcacatataggtatgacactttatacttgtatagtataaaaatattaggccaggcgtggtggctcatgcctgtagtcccagcactttgggagactgaggcaggcggatcacaaggtcaggagtttgggaccagcctgaccaacatggtgaaatatacaaaaatacaaaattatacaaaaaacatgcaaaaaatatacaaaaattttgtcctaaaaatacaaaaattagttgggtgcggtgacatgcacctgtaatcccacctactcaggaggctgaggcaagagaattgcttggacccgggaggcagaggttgcagtgagccgagatcgtgcaactgcactccaacctgggcaacagagtaagactccttctcaaaaaaaaaaaaaaaaaaaaaaaattagagcgtcctcagtgctttatataaacacactttttactaaaaaaatttacaaagcatatttccagttttgctttggagtgaggaaaacaagttcccaggagcaggtatcatgagtccactttacaagtgaaatagctgaggtaggtgatatcacaaaggccactgttgctttgactagacccaagaactttgtagctcaaaggtctctgcactacatccaccaagcattcatggaaaacctgggacgtaaatagggaactgtgcttgggaagtacagagataaaacaattctggccccacctcgcaaggagcttacagccttaaaaagaatgatcatagaaactgttaggtacaaatggaaacttcttgctaaatacaagaactactaaaatgttacatgacccaagagaatgggccaatgctgaagcccatgtcagctaaggctgaggtgaggaagtggtctttttgccaagccttgaaggacaggtaagactgcacttgataaaagaaggaaagtaggagagaattccaggctgaagtaacggcatttatggagactcaggaggctgaggcgggaagggaagattgctggagcccaggagttcaaggctggagtgtgccatgattgtgcctgtgaatagccacagcactccagcctgggcaacatagagttcatatctaaacaataatattaggtatttgggggraaccttaggaacctttttaaatgcagctgtatttgctgtgcatttgtaaaacgaagaagcagcatggtgaacccagtttgagcagagctgcaagttgcttgttacgcacccctcattgtcacagagcattcgatttatcctctgggcagaaggagcttctgctgctgatggacrggaaatgaaacatttatcacattgctgttattatttttaagaattctttaaggaaaggaaaaataatcaatccacaataatagagaatcaactccttaaagagaggaaaagtatctgagtgtaaattgatgggcaaattaatttccctttttttatgtaaaattgttgtgacatgttaataatttatgtaattttagaaagtaaattggattttctttcaacctttatatatgaatatgtggtcaacctaactatatactgaatattatactagaaactgaatgatgattcagaatagtataggtgacattcagtttcattaaagattaatagtagcatggccttgtgtgttttgccgtatcacaaaaagcaagatttagtgactagggccctggattatgtattaggtggcaagacttccagtccaagctgccacacacttgctgacatttgtgctcacgttaattttcccatccgtaataacgacagtaataacatccaaaaccagtatacccagataaatggtaaagattaataaggtaatatctgtgacaggctttgggcttcttagaaaagcactgaataaaaagagcagcagcaaaaccttctagatagatagtgtcatcagttcrctgcactctgcacagaaggaccacgttgagattctgttgtgcagtgtcagtcccgtaggtcactgaaggaggaaggggtggctttgggagtgactttgtcactcattatttgaatgactttgggcaagttacctaatttgatgaatttgttttatctgtaagtactgataacatacattacttggactcataagaattaaatgaggtaaattaattcattcacaatcagaaaattctacctaaatttctctttttgttttggcccttgtgggaacatatgtaaaaagcagtgttcttctacacaattgacaaaatggcgtgatagaccttaggatttgttggtcatatttctgatttggtcattatttcttataatttcaccatctctctagtctttgttcagtattttttaaaactatgcagcagtggaaaagaaaacattttttattttcctcctacttcttttcttttcttttctttttttaatgtaaacccttcaattatatccacctcttatttcttatcctttgtttactatctggaattaaacaaggaggattaggggtggtgcttcacctttgtaaaatgcacttgaagttcattataaacataaatatataatttataaacatttatttttataatcattttaataattataaactaataatttataatataatataaataatatttatttataatatacttgtttaaatatataaatttaacttatttaatttataaatttaacccaacgctcttgggttctcatgcattaaatccctaccaacccagagtaacttaggaaaagatcctcctgagaaagttcatcattaaattttaaaaaggggacctttttacttctttttgataatcttaggatagcaagaattgacacttacaaagtcttattgccaaggagaaggcttgatgatgcctgttagtatatatgaatcagtcatttatcattaactgtttgcattaatgctccttagctatttttatcgaattagttgtgacaaaaagtatctgaagtttttgtgcttattactttttacttaaataaaactgcactctcactccaatctttttttcgtgcgtgtggcagaggtcatccgcagtgctctgtccaaataaccattcatttactttgaattatggcagtgggatgctcagtgtttgtggactcgcaggtcagtatgggtaaagaaggagagagagtccaggcacagccttttcagtatttctctacactgtgtctgaaggataatgcatgtggtcaagaagaattttcctagtcctgtgactgtttaaaatttgagaggggaaaaaaagtctaagacttctgtaatgctccaaattgtttttcaaatgaggttttagcaagatgaaaatacctttcaaaggatttatagacccatgagaatttttaaaaatctctttaaacataaaatattctcctagctactggaatgtttcgggtgtctctgcttaatcagctgcctcacttcctggtctctcagtactggcttggtgcctttacagcccaatcatggtttattgatattgtgctgcacactattctttccgagttttttctcccacaattgtttgacaattttgttcattggtgataatgaaagagaaaaaagaagtgccagccacccaacacagtcaacacccatttttgcatgtcgtttctgtgcagcagaggcaagcacagaacctgaacgtgctcagtgaggtactgtttagtgtcgttctgtgtgggactcggatttgtaaagcccctgcacttgtaattcaccaaagtttcccagacacagttccagtggcacattccaagccttttgtttccagtgcagtattgggacttggttgtaactacaaaaactctgatgataaatgcctgggattctggttggaaacacctgtcagaaggacttcaagaaaggttttagagcctagggtcttctgagtagcagtacctgttgactgacctgctgtgtgctctgttagaaaattatgttggaaaatactctgtgtacttggcgacaagcctttctgagccaggcatgtgttgatatgacatggcggcttcamacagtcctgcaggtgctgtggtatattacttaagcttttttgattccaagtaacaaaaaccaagtgatttgtgcttaagcataaaagagacacacacacacacacacacacacacacacacacacacmtataaattttactttaagttccaggatacrtgtgcagagtgtgcaagtatgttacctacatatacatgtgccrtggtggtttgctgcacctatcaacccgtcatctagattttaagccccgcgtgcattaggtatttgtcctaagctctccctccycttgccccccactcctcgaaaggccctggtgtgtgttgttcccctccctgtgtccatgtgttgtcattgttcaactcccacttatgagtttgaacatgctgtgtttggttttctgttcctgtgtgtgtttgctgaggttgctggcttccatcttcacactgcaaaggacatgatctcattcttttttatggctgcagagtattccatggtgtatttgtaccacaytttctttatccagtctattttggtggagatgggatctcactgtgttgcctaggctggtcttgaactcctaggctcaagcaatcctcctgtctcagcctctcaaaatgctgggactacaggcatgagccaccatgcctggcctaattttgttctaacatctcagtaaatttagactaatcagtagatattttcagataaaatataaattctatcagttttatgagcacatacatttatagatttgtggaataaaatttgtattttgtggtgttatgtttgaaaataaaaataaaattcaataatgaaaaaaggaaaataagaatacaggcctgcctcatagggagaactggtctaggacttggaagcctatcttaagccagttctctctgcccctcacccccatgtctctgcctcccttcattttttcttctctctgagggctgtcccagggtcagggacactttaaataaagtaatctctgggatttacttctgtagaagagaggaccacttcaaaagactcactgtgaatttatgaaaaacacctgaagccatcatatggcgcttatgttgctcttgatacttctttcttttacctgctacaccccacatgagtaagagcacaagactgagctgtttagggtgctccaggcagagaaggcatggaagcttggaaagcgttttctaagtcttttctgctacacttaatttttgctcattactgtttgtatataatccttatcatttcatagctcctggcacagttgtgaatctgaatcttgaagggatctctgaagatcactcagacacagtcayctagacagaaaccataacrggtctccacccaccgttattaaatcatgcatatggttaggaagtgcttgccttgtaaagttagtgatggctgggcagctcctaactgcgctcctattgatctaggtccgtctgtaacttcctccaaggtgcacatgttccctttgcagcaatacagaataaggcctgtccttatcaatgacttcaaattcctgaatatgtaagaagtcactctgtcattcacttaaagatatttaaatgcctaacgtttactgggcagtgattaagtgctatggatgtcagattttaaaatgtttggcaaacatttggaatagcaactggacaagcttctgaggaagtgggagagggcagaagagaagtggaagctttccaaggacacctcagccccaggaagactgggtatcatcaatctgatgtagaaacgtcctctttattcagtcacccggtggtttacaaagtctttgacatgggagccagaagtcacaatgtaaggttagccctctaatataggaatgtgggtttcatgttgcggaggtgatggaaggacaagagccagggcattgtaagtgacagggaggatcgtggatgggataagccaggctaccccagctaggaaggaaaagagggaaaagtcaggaaggaaaagggctgatggctgggaagagatggacaaactaatgaaagagactaaaagttcagtcaaatgaatttagagaggacattaatccttggtaatataataataaagtacttgtataaagttcttgtatgttctcaggagtagggrttgctgataccatgtaccaatatggaggagagatatataggctgattggtttcaaaaaaagaccatattggtcatcttatgtgtatttaacttaggataatactggatatagttttcattttaaatagtgtaagtttgcattcataacttggcataaagtgttttatctcaagaacttactaaacttgctctttaaagttcattgcagccaattggtacacaaatagttttagagtgttctattgttcttcctgagaattagactaagtaatgtgagaggagtcttaaaatgttaaatgaaaaggctcagttttaggcaatttttgagagctcatcattttcaagcacaggaaaacttttttaaaaaccttatagaagccaactggaattgaacattttaaaaattgctatggataatatacaatgtaaataataattctttgccaatttaaatggtaaattatcagaagacacacacacacacacacacacacacacacacacacacrcgsacacccctcctatgaatgaaccattttctggctttggatttattctgtctttaatgagtcattttgaaatatgtgttttaatcaacagaaggagtgctaattactcacgtaactgcttcaaattattatgtacttattttttatgggctacatgtatgcctttaggttggtgtcataggtccataggggcagaaaacacggaaggtgctatactttctcttaggaaatctcacattggtctgtgtattatgaggacagaaatgatttttaatatctggtatgagttgagctctgtttttgttttatttctttaatttctgcttcttttagtatcagtagtcttatttattgatttaagcattgttagttgatttttttttcctttatttcaagtaactgaaaatttagatgtcacatttctgacagccatatcatttggttgatctccgtcattagtttctcttggggcctgatcgattgttcacagttttggctgtcattcttactgccccatggctgtgggtgtttctgtcaaagagaactgtgaattgagaatatagtggcagtttcatggcttgttggcaaggtgaccacgtaatttgtcatctgaacaaaagtgcttttggctaataacagtgatgccaggacaacatgcttaacccatttcaaaccaggacatatgggcactcaacttataggtgaccattttgcacttcagagccttaaattgtccatgtttctgcaaatctctctcttacataagactgtacttttcacaccaaattccaaagatttggaaacccaaatctttttttttttttttttactgagtcagggtcttgctttgtcacccaggctggagtacaatggcatgatcttggctcggtgcagccttgacttctgagacttaagcaatccttccacctcagccccccaagtagctggtactacagatgcatgccaccacttctggctaatttgtgttgttttaggagagacagtgtttcaccatgttgcccaggcttgtctggaactcctggactcaacccatcctcctgctttggcctcaagtgatcctcctgccttggcctcccaaagtgctgggattacaagcatgagtgaccgcacctggcccaaatcttactttatatgcagaactatgcggtagaagtggtgccttcctagaatagcagttttaatcagggctaaataatgtgcagtactctttttatattagacatattttaatggaacatgacccaaaatgtgcatttttttagatgaaagtttgggtcttcagagaaataccacgtttgcagcaagttgcttaatagagcatccccaggcctctctggtttctctccacttagaccaaagtggtactttggtctacatgtttgaaaagagctgacttaagtgaccatacattttgaagatgagaaaaactgattaactctggtctgaaaacgtttggacattcctgctgctcttcttttgtcaaatagagacataaaggttatgactggggggatggagaagaccactgaggcctcacatctctcttaaaaatctgcctgattaggtgccaggagaagtttcttctttgtgttactcaatgtcttgtctttaaaccttctggtaaaaggtgaatacactcaaggaaggtgtttgttgattcatttaacaattatgtttgatgtgtttattttttatatctgtattttatataacatgaagtatttacagtagcagaaacataagaaatgaattatttcaacagctggtacgatattagcgagagaactttgtttagaaaaatatcttgacctaaaacctgaggtcaamgattttcaagggaacaaaagtaattaaaccattccggataaaaacaaggatttgaagatgggaggagtgagaagagataggactgagctttaaggtaaaaactccaaggatttctttttaatatttagctgtctatcatgaagccctttctgtctactccctgagaacttcagttatgtgtgctgcacaggtaaacacctgtgtcagagattttccagggagagcagaaggagaaaggtgctttttcagtgaatgtgtgtgaagccccagtgtacttgagcattcacaagattcatcaagacaaagatttgagcaagagctcaaagcccaaagagtaaatgttttcccacctactcaaaactccttagacaaattgctaggctaaaatgcaaggcacctttagatcaaagtgcagggttgaagataattgcttttgtattcagaggcgggatttctcagcttacctctgggttgagttcataagacttttatgcctccatggaaagtctgagaacatcctggtaatcagggataaatttagagaagtggaagcaggtggtatcaaacaccagcttcttttccatttgcatagacatatccaaggccatgaatcctttgacatgggccagaagttctaagttgaatggtatgaaggaattaaaatgacacctgtagcaacagaagaatatgttaactacaagaaattgggatacaaaatcacagtattgagagtctcaagagaagtgtgttgaacaataatagcaattttgtttacttcatgctgaatcctagtatgtagtatattatttcaacagtatttcagttattatcatattttcaaacattaatatgcttaagccgggcacagtggctcacgcttgtaattccaacacttttggaggccaaagtgggtggatcacttgaggtcaggagttcaagaccagcctggccaacatggtgaaaccccatctctactaaaaatacaaaaaattagccaggtgtggtggtggacgcctgtagtcccagctactcgggaggctgaggcaggagaatcactttaacccagtaggtggaggttgcagtgagccaagattgtgccacggcactccagcctgggcaacagagtgaaactccatctcaaaaaaaaaaaatgcttaaaatagaacaaagcttgtcattttttaaaaacatgactcatttgatgtggtcttgtacaataaggcattgatttctggagctagtgatatattcataaacaaaccatttcctctgtcaaagaatctttttaaaatatagatattggatacccaagttattaatatttattaggacacaaatagatatccatttttactggcttatattcttctgtattgtgtgtatgaaataaagagcatttccccaagtttgaaaatactcattccttcatcataaaacaaaattcacttctaacaaagaactataaaatactgtaaaagttaattaagtcttgatttatgcacttaaggattagcctttcaggatttcagtgatatataattcaatctttttattatcttaatataaataagcttgacaattatttcgtgatcttagtttcattcaatttttacttagtgagatggcctgatattcaattcttattccagaatgagaaacatatcccttaaaataatagaagtctttgctgctttagcatatgagagtgattaggattttacattccttctagaatctattttatatggaaatgtgtacacttgtagggtaataaccttcataagtcatttgagatttctacttaatcagattctgcccatttctgctaacatattgcatagccaaatacatatgtgtataaaagtacttgtttatcagtcagatgttaaagagacttcccacgtggcaaaataacaaaccaacatagaacaggaagacccttagcctttaaaagttgattttaagagaagagcataatttctgaattagtatcaaagattagataaagaagatccaagtgaaaaactatcaatttactgcagttttagaaaaacgattgactagatacaaagacaagtcttatattttaaaaaaattgcaaataaagaagtagaatttatcactgggtcactttttatctgttagcgatttcttccatctctagccccagcccctgtcttctgtctcttctccacgcctctgtctaccccatcccttcactgttatctcctatcactgtcccctggttagttgtctttatgcacatggccgttcattgtttctttcttttttttgttttttgagacagggtctcaccctgtcacccaggctagagtgcaatgataacaatctgggttcacaacaacctcygcctcccgagctcaagccattctcctgcttcagcttcccaagtagctggaattactggcacgtgccaccacaccaggctaattttttacttttagtagagatggggtttcgccatgttggccagactggtctggaactcctggccacaagtgatcctcccaccttggtctcccaaagtgctgggaatacaggtgtgcaccaccgtgcccagcccactgttgctttctaaacaccttccagtctgattatccatcctgatgatcattcttaggtatgtagatccctaatctgataacctgatttttcaggttatcagaggcccataatgcttgggcccttagtctcactcccggaaaatttattaaataaatgtagatataatatgtgtgtttttgtatttagagatagcaccttcagcatgtttttaattcatgggcattttcaatatgaactgttgtccagaacttgcccattaaaaccatatgtgtaaaccatatgtgtaatactttctatgctkcctcccagagcccgacttagcagtggccttaatcaataaattattcattatttaagctaatatttattaaatacttactatatcagacactggagttagggggtcattgtactagtctgggtaaaagaagagcgtatttctgccttgctagtacatcagctggctgaataacaatagcatttaccaagagagcacgacgaggaagatgaagtgcaaaaaagatcaygaatgtagtcatgacagtgtctccttcaccactgtgcccttyaatattggcaataacatctcaaatgctgrcaaagtcaatgacttttaatttatactctttggtttttacttgtagmgcattctaatcccactgaatccstcaggaaatgaatgtgtaggtctttcattctctttctcaccaacaccagggctgggccttccctatgcaatggcttactgcctgtatatcctacatggaggctgtggtaacttcctgtctggttcattcatatgggttctctcacctcaagatcagtttgaccaccctgacatacctgcctgcctggagttccctccctcatacctgtcctgcctggagtgcctctcctccacctgtcctgcctggagtgcccctcccccacctgtcctgcctggagtgcctcccccacacctgtcctgtctggagtgcctcccccacacctgtcctgtttggagtgcccctcctccacctgtcctgcctggagcacccctcccccacacctgtcctgccatcagtgcccctccctaacacttgtcctgcctggagtgcccctcccccacctgtcctacctggagtgtctcccccacacctgtcctgcctggagtgccctctcctcatgcttgcttggccactttctgtctactcttctagtcttagctggagtgtcacctcttttgggaaaccatcctgtgctggctccctgccaccatcctcccacatccccactaagaattccttccttccctctgtgtactcttytgtatcttgtatatgcctctatcactgtcctgataaacatctgtcattctcagcagtttacatgtcagtcttccccaccaatgtgagctcctcgagagtagagattgtgtcttatatacttattcagtttagtatctcctgcatcagtatagtgcctggcacacagtgagcctgcaggaaatactggctaaattgagtgttttcctcctgatgtcttcccaatgtccacaggatgagattgaaactttcctgccccctgtgtgatctgaccatccgtgtggctgaggtggcctgtctgcatgcctcggccctgtgatccagttgcattccgtgcaccgcagccttttgctactgatgttatccttgcccagatgtgttccttctttttccctgcgaagtaaacagcgcagaccaatccattcctttaagcaagagcacaggtgccaccatctttaaaaagcgcacacaagtcgatgccaatctgtgttatgtctctcttctcagaaccttcaaggaagatactgcatatgctttgtacaatacagtgtggacatcatatgccatctttattcacatagtccatgtagattacattcatgcctaccataaaagaagacactttttgagcataaaagttgtaccttatacgtctttaattttcccagcagcactgaacatagtttgaggtcttaagctgggtaacaagtaattgttgctgtaggcagaaaggagtggaaagtgatttgaaagcctaggccctgaaactggtttctcaacatgacttcaagggagtgtccaatagttcttccctcatcatggtccgtcagtgtgasaatttgctcaaaaccatgcataaggaatactatgtcaaagtgactgtgttagtggcatttcttagtgcgtgttccgatagtaatagcctgtggaccttgggcatattttgaagttcatctgtctatttkagtataatacattttgaaatattaagttctttcaattccattattgaaaacgttttgtctgttctgtgtagagcacagatgggatccctcacatgaggtgtcttctctcaaaatgtatgtgaagtagcatcaactttacagataatccaatgacaacatgaggtggttcaactgagattcttaatacggtgacaggtacacagtaggtcctcaatatgttgattgatgaatgagatagttattaaacttttgaaagattctttatatatgttttatataaaaaatcacaaattctgtgtcataaaatctcacaaaagatgagtttctacgattaatggtagaataaaatgcctgtgtactacccaaaattttcctaaatttcaacgttgaatacttgtgttttctttatactttggatctttttctccatttttggaagagtgtgcgcttgtttgtattttactccctccttggaaaacggttgcccattcatttgatctttgagaaatttaagcaattacttaatatttatttttgtctttgcaattttggtgtaagtttcgtgttgtataggctattcggtagtaaacactttagttagcacatgctaatcacactcttaaatcttcacccacttgaagataactgatgtaacctactggaaattaaggctgtaaattttcgggtagagatttcagtgttgctgcaatcaatactttgcagatagtgctaacagctttttctatgaaatatgttggctagtgggtggaaaatcaatgtctgggaatgaaaaacaggtgtcaagtttgatagggacatcatgcgtttgatatttggaggccagaggggcctgtcaacaaacacggcaataattccgtcagatgcagtatgtgtggaattaataaaaatgccagaaacaaagcagtctggacagaaagctagttctgcaaaaaaactcagggcaaaaatgtatcttactcgtgcaccttaagtgaatgaattacagaaagacattgaggtagagttaaaatgaaggcacgtttgcagcactrtagagtctgacaggagaaaacagtaggcagagcagtaagaggtagccacaccaccccactcaaagggactctgccaagtgtccagcagatgtgtggagatatgacggttgctgtaatagagtgctgtgatttaatttggaagtcactgaacccaagcaaatcagcagtcttttctaggccagtcaagcttggcctcattcaggagttggtgaaaatgatgaaggcctgagttagccaagaagagagaaggagcaagggataaacaactgaagacacattgatcacatgcaaaacacttgccaaatacagtgaccatcagtgtcttacaatagaaaggatgcacagttattcagtattagggaactatttgtctattcaataaattaggggaaaaataatgttgaaaaaaggggacaaaattattagtcatcgttgttcatagtattctcttcctggaaaatgtagaagaatccactgaaaatcaattaaaactgttacaagagtccagcaaatacatagttacaaagtaacatatgtaaaaaccagtaactctggagccacattgcttggattctaattctggccctactatcagttatgcaaacttgggcaagtctccttatatttgtgcctcaggttcctcatgtgtaaaaatggggattgttatgcatatgaaataaattattatatataaaacttcataatactccctgttacacagtccaacataacgtttcctcttattgttgtttccactgctattcctagctttcctataatcttcatagaaaatgtaattaagatttcatttacagcatcaataaagagtatacaatacctaggataaaatctaactagaaatactacaataaatggaggaagcctttatattttagagatgtcagttctcccaagagtaatctacaaatttaatataatttcaattaaaatcccaaaaagaattatgaagacttgcaaaatatttttaaagtttatttggagaattatgggcatgtgaaactaataaaaaataaattgaaacagaagcattcaggagaggatgatttgcccccatcatatatttaaatatgttatagctcagtaggataaaaatagaaaatacaagcatattaaatttagaaaagcggcatttcatacataggtaaccagaaatgagttatttactaactggtttggggcagcagagttatcatttggaaaaaaaatacagttagattaaccccctataggttaaggtttaaccccatagagattaaggtttaactgaaacagatgaagccttggaagtactaaaaaaaaggacaggcaaatattttttgtagttttgagcattgaaaagcctgagattcttctcagtatgatctcaaaattcaaaaccattaaataaaagattgatgaatttgactacatagttttacatctattcatataaaaaatatttttaaaagagaaggacaaatgacaacttagagaaaaaatttaaaatctgaagtaaaaataacttcagtctattatagggtcttaaaaatcaattaaaaaatgaatactataatataaaactgggcaaaggattataacaggcaatttgkgaaaacagagataaaaatacttattaaacatattttaaaagtcagtaccagctctaagcacagatgtaactatacatatgtactatacatacactgtatgtatcatgactatacactatatgtatagacactatacagtcatgtgtcactcaacaataaggatatactctgagaatgtgtctttcaccatttcayggttgtgcaaacatcgtagagtgcacagacacaaacctagatggtagagccaactacacacccagggtatatggtgtggcccattgctcctaggctacaaacctgcacagcatgtgactatactgaatactgaaggcaactgtaacacaatggtatctatttgtgtagaaaaggtacagtaaaaatgcggtattgtaatcttatgggaccactgtcttatacacagtttgtcattgaccaaaataccattctctggggcatcactgtatagatttgttaacgtctatcaaaccgaaaagtttgtttttaaatgatagtacctgaattatggactgataaccttttactagttattgtaacaaatttctaacttcctaacatgaactttataacttaaggcaacagaaatttattctcacacagcctgcagaagtctgaaatcaaggtgttggcagggccgtgctcctttcagaagctttaggggagattccattccttgcttcttctagcttctggtggttcttgccacgtgctggttcattggtttcatcactccagtctctgcctccatcttcatgtggccttcacttcatttggttttcaaatctcccttgtgtatctccagaaaggtacagattrttggatttaaggtcaacccatgtaatctaggatgatctcttcatctctagatctttacattaattacctgtgtaaagttttttttttttccgaactaggtcacattcacaggttttgagacacagacttatcttttggggaaccactactcagccaaccctctgaccccaaaacatggtcctccagcccatgtgtaaaatacgttcaccctatcccaacatctaaaagtctcaacccactatagtgtcaaatctaagtccaaaatcccatttaaatatcttcaactcaaaagtaccaagtttcatcatctaaatcatctgaatcagatatgtctgagcctctgggtgtgatccatctgtgggcaaaatctccattcatctgtagacctgtgaaactaaaaaaaaagttatctgcttctaaaatacagtgatgggacaagcataggatagacattctcattccacaaaagagaaactggaaggaataaaggggccacaagacccaagctagtttgaaatccagcagatcaaactccattatatttcagagcctaagaataatactctgtggcccagtgctccactctgggctcacagttctgccggcttctgcttctgggctcaaggctctcccctagggattgttttccttttccttgaacaatagtatatattttcagccaagtggctctatcagcctgttttcttcctgtagaattccggaagtctaacagccttccttcatctcatcctgtctctgtcctcattctgtccaagctggtagtgtttgtgctgatacaacattttcataagcctagtgggtctcctgtgtatgttagaggatccaggtcattagacaagagaggcctccatgaaattttcaaggataaccccattcttattcctggcttctgctgacatggctgattggatccatgagtcacacacataatccccttagcaaagggctgtccagccattcccttgaccctctctccagagcacctttccccacagtggacagcctaattttaatatcctttgcaatctggatagccgagaatcttccaaactatcaaatgctgatgtctttggcttaatagtttctcaattcgtctcttttccacttccattttattataagcagcaatgagaaaccaggctgcatcttcaaaatttggcttggaaatttcagctaaattgaataaaaagtttaattcttagatttattctatctgtgaagaaaaataacctgcaaatcatgcagaaaaartataatcatccctcagtatccaggggggattagttccaagactgcccccctcctccccaccaggacaccaaaatctgcagctactcaagtccctgatataaagtggtgtgccatgtgcacaccctcccatagcctttaagccatctctagattgtatatattacccaatacaatgtaaatgctatgtaaatagttcttatactatattattttttatttgtattatttttattgtttttttcccccaatatttttggaccgaggttggttgaatccgcagatgcagaaattgcagatacggagggctgactgtacctataaaaagaggacagatcccatgttacgtgttctctccacaaaagaaataaacacaaactggaggggtacaaggaaacttttggagatgacagacatgtttattaccttgattgtggtacaggagcacatggatatatgcaaattcatcacattgtatacattaaatatgcacagtattttgtatctcgattattttttaacaaccctgttttttaaaaattgaggttcaaggtgaataaggaaataagctacttgaaatgattttataatactgacatatttattatgcctcagtgtatatcttactgagtatcttagagcacctatgcctcagtaagaatgaggtgtcaaaatggagtaaacactccaaatattattgaaatacaacaaagaaggatagtttcaggcggagtagccacatcatgctggaggttgcatcaactggtggtggttactgtgagaaaggaagacttggaggatcatgatagctcctcacatggcgtcggggtaactccggggaacagaaggataaaaattattgtgtttggtttcaaagtaaaaatgaattggttcaaggaggctgttctggcacaatagaaaatgttctacactctgatttgtcccaaacagcatctactgccccaaggcaatgcatgctgagacagaaggcaaagtaaccttttagagatttttatagaggtgcttatgcgttgggtaagtagttgtattaaattgtccttcattcctttttaacactaaaacagtgggaacccaggctgtaggtagaagacctctttttctactcagtttctctagctatataagttcctcaagggaggaggattggctaaggtgcaaaaatggtaaattgatagtactttgttcccaagtgactattattttgactgcagcacacaatgaatttttgtggacagaatgtaatgtgtgggcactcagctatacacagattaaaagttatgctttctcagagatgttgttaaccatggttagatttaagaccagtttgcagaaccaggcaaatctctcaggcactctctgacttctgcaccatttcctcccctgttacctgagctcctgcaacattgaagacttaatttgggcgcttcgcttgagtgcacatgtaatgtgggtatatccaaattggatatgtgttgttgtggctcaaagatggccwtatttacaactgatgatgtaaatacagtttttctcatgtccacagtggcataaattttaaatgcaggaaagttgctgtttactgggtgtttatcrgtcctaaggtttatgcttaatgaacttcctctgcttctgaactgggatcatgggctccttgttttatgaaagaaatcattccctaagcaaatgagtctctcagccagaaatgaatgatctggacagaatgatctggtgttgtttataagtaatatatgaagttgaataaaacatctaagataaggagaaaagtctatttttagggctgtcttctcagactaaaggtttcttcaaaatccctgtgctttttcttatagtagctttgtggcctctcctcacacttaataccttcattagttacaattagcacatctttttctcatccactttacaggaaatamatttcttatatctttactaaattccaggctctcagaaatgtgtttgtgaggaaaaatattttctgcttcagataatggcttctttagatgtttgaaaagtctccctttcctttttaaacgtgattttactatttaattaatgagacagtatactgtcctccttctgttgctgattcaacatcttaagtgtgagaagcctatattgagttaactgcagttattgaaaatacccatttctcttgaggtactaaattgctcattttgagaaatgagtcaaatgtatatatgaataaaacagtctgaattcctgtaaatatactttctctaatatcctagcttcacaaatcttttagtttccaatcctctgattatttttttttctcagtccaattctgatttgtaaaatcttaagtgagttaatttccttaattctggggtgctctctaaaggctgagtgtggattgggtggtagaactctgctaatctgcagaagacaaggtctgagatcgtgatggactagtaagaaatccacacacccaaaaagcatatggaagggtgcagaggtgcgagccatagtgttgtatgttagctcctgatcagtgatgtttatctaataattttggtgttttcctcctctttatgtgtcactctttgaccttgaacatggttctacttttgcagttcttatggtatattaaaattatttatgtttgactgctgtaatagactctgagcttcttgtcttttcatgtttatatcacctcttaacttatggtgcatattcaattattatttattgaatgaatgaagatgtctccccaaatactacttgtgaatcttttagaatagagacacgtggctatctctgtcttccactggactgtgctctaaccctggtatcttcagatttacccctgaaatggacttgatctctggaatttagaacaaaattaattgtcatattaatcatattttcattggttttagtgagaaacagttgagagggtaggaggaagacaggaacctgtgcagttttaaaaacccagctttctgggttttgtttttattttttcctcaattagcttttagattttttttttttttttttttggkgttatttgagacagagtctcactctgtcgcccaaactggagtgcagtggtgcaatctcagctcaatgcaacctccacttcctgggttcaagtgattcttgtgcctcagcctcccaagtagctggaattacaagcgtgtaccgccatgcctggctaatttttgtatttttagtagagacggggtttcaacttgttggccaggctcatctccaactcctagcctgaagtgactcacccacctcggactttcaaagtgctgggattacaggcgtgagccactgtgccttgccagctttttaggtttttaagcacatagccgtatttccaagcatcttatagtcacagtgttcatagtatttccagcagccctttagtcagcctcttgattgttattatgcaagtctctgtcttacccctaccccagttttaattctggaaactgcaacatgattgaagtacgcacatagccagaattgggatagttgttagagttagttctaggagcataatccatagtaaagcgtttggaacatcttgaattggtctgaatattagtaaataactggaactattttcaggggtttttttttgccagaattatattagagaaaacctgatacattttatgattttwtgcaactcagaagtaattaccaaattcataattctgtaagagatttttaatacttgcattattagaatataccagatttattatctagaaaccagcctttgaaagttaataaaatgcagttgtcagaattgcaaatacctgttaaatcttatatattattttatatgcatataaaccatgcataagaaaatgaagcttcataaaaagttgtaggaacctttacagattactgtatttctctcctcaacaatataatacttgttcagatttgttttttaataaaaattaaaggagatccatcttaatcttaatatttccacaaagtttaaatgttgttttagaatcattgcttttatacttgtttttcttaaaaatacttaagtataccagtttagaatactgtttgattctataataagtattcaaaaaatggtagggattatctttattatttaaaatgtggtatttgatacctgctaagttccgtatttttcgttttaaacatttttaaattgacaaaaattacatatrtatggtataaaacatgctttgaaatgtgtgtaccttgtggaatggctacgttaagcaaaatgatatacatcacctctcatacatcatttttttgtagtgagaatacttaaaatctactctcccagcgattttcaagtatagaatacattgtcattaactacattcatcatgttgtacagtagatctcttgcagttatttcccatgtctaactaaaattatagatccctatttattattttccaggatagaagatttttagaggtgacaggccatgtagataaggctgragaagttcttgaacctttaaaattatgagaaggaccttttcatatgcatggatacctgggccctgctcagaaataattgaaaaccccaattaagaaaacaaaaaccttttcagatatattgcaaacagcatattgtaaaccaatagaacaagttacggttagacatttcaaatattttttgttcttggctttaccaaagaagtagtcattttatgagatggaagaaatgaagcctttcagggttgatttccccagaagtagatgattggatgcatcccatgtgaagacttctgggtgtgttgtgtttgagcatgtggagggtaaagaagttctggctggcatgctttcttagagtgtctaccacatatctatgcttgttatgtgcagccaagcatgaagcctgttgttctcactctcatcctagtcatcttcccattgagaattatttttctatttgggtgattacccaggtccaggggcactaatcctgcttcctgtaggatggttgggtatgacaaagtgtaaggttgcattgggctcatggtatgggtgcaattattaaagttatgtgtcaaatcgaagctgatttgaagttaaaggaataaggtatagttcaaggtcattgaaagcggtaagatttaaagaacagaatcacagatttgtttgtaaacagtgatatgtatttttatgtgaggaactagaaaaagaaggttcagtaaaaaactacaagtgagtttcttgtcgtttgctaccttttaatctcaagtttttaaattttcacttctgtgttctattgtgccttgttgtcagatatttaaaacagtaaacatataattgttcgatgagagagctatttctgttcattctggacctggatgcactgagcagttcaaagtttatttcaccagtttatctggagaatgttgttcatttatcagtttctgcatttgagagttaacttgctaaaattgatttcatcctatattccttggctcaagttgattacaccaatcagaatctctccatttttaaaaaattaactctgctatttagccatgcagcattagttgataacatttctttagcatatatttatgtgaccatgcagtcttgtcacttgggttcagtaaagtcttgtctcgcattctccatttagccaacattgttggtggtaatgacttggaattaatgcagtttgtcagcagctatagaatgcagtgatagcaggaacgtccttctacatcttcttcagactgatgtatgaaatagcatatcccatttatttctgtaccacattataaacaacatctatgcctggctttgctcaaggatggagctactaacatctgtgaagattgataccatggtttatcattttaccaggtgaaattcatggcaaccttaaaagcctaagccaagagcttaaagtattgctcaggtgtggatcatggattggattaaatagtgccgtgaaagccattttactctttcagctccttggtggtatatagacacacacttgacatttggtggggctttgaagttaattaaggcatcattaaaggcatgactttgagttagtctgcactgagatgcaccatgtgtgaccaaaagaaaaaaaaaaggccaagcatatttgtcatttctactacagtgtggttatatcttctttcttataagatgtgtaagcaatgtcctgcagtgtgtttgtgcagcatttatacccagaacttcttatgaaaagctggccatactatgattaagtccacttgtggttgggattcaaagtccccacagtagagcttgagttggcttaagcagatgaacaatcgtcagacttagttactctttgttgacttacatctgtaytgtggcacctagggtgcagtggggcaaactgtcactgccacaagggtgaagtgaaaagtatatgtctatactcttttatctttcatttatcagctagacacatgtttccttcatgcaarggaaagaaaatcacaagggcccatgcttgtctctctttagaactctctagaattagcttgtcatgaaatgtaaaactaatgtgcagttgtaaaaactgctgccagctttttcctcactgcaggctgatggctaagtagatttggaaatgaaaggggttattataaagtgattactgaatagctaggtatgtcatcttaaacaagcagctaaaatctctgtgttagacattcaggctgtagtcttgttttgtatcattcatatttaagatgattttgattgtggaggagtaatcaagcactggggtaatttaagaaaaaatatatactgagtgatttttttcattgcttattaaaatacattagaatttaaatgaggcattctctaaaatgtgtaactattaagtatgtaccaaatataaaaatctgaatagcagttggctttagttcagagttaaaaattcttcacttgactaaaaacgtatttatcttcttttaaaatttaagtaaaacgtattgtaaaataatatattgaaaatggcatatatcaaagaatgaatggtttaaaaattataactcttaatatcttattactgtcagtttcatatgagagggcagatgccttgaagaatcttaaaagaaaaacaaaattaaaataaactgcactttattacagcaaatgcggtcattttcaatatccttctattctttttaaatgcttttcttggaattgccatctatgttgctggcttgaacartcacataacctctgactccttctcccctacccttgagcttcagatctagtgtaagtgacatgctgggtgtcctttgaggatatctcaagcagcaagcagtgggaggcatctcagcctaggctcttgtcccattgtcccctgtcctggcaatactgccttcagtttgagctagctttttgggtgtctttttcctgtcccttttcccaccttcctgctgtacacctgcccagctaattgatcacagcccatggattgtttctcatgttgccattttcttggtccaggcctcatgtactcatcgccaagacagttccccctgtagaccctccaactcccccttttctgcaggcttcccctcttcactccgtctcaaccgcctacagctgcttattgtgtctgcttcccaggtcctcagccctctgttccccacagctgggcacactgggctcagtaggcataatcctgtactgtcttcaggccctttgctgacctcatgcaagggagatgtgaagagaacatacagctcagcacctagttcccttgcttctggttcctgtatagcctgttttatcttggtgatacatgaggagatcagatcctaacttattagccctaccaagcaacaaggtgcctgtctatggtggtacctggccctctttcttagtagtatgcctagtatgtgccgcagattctagtccctgcctgggagcttcttagtcactggtagaatttcttaatgttaacctgaagcygcagttttagtctgctgcccagacaggctgtgtgatcccctgacattatatcttcatcaatatggtccactctgccyggattgtttctgccctctttcaattatttggtcctatggtagtatctttattatatgcttgctattctaagtttacattagaaatgagacttgagtgtactgatgctgtttttttgaggtatgctagttaggtattttttttttcacttctttttcacgttgttctccatgttgggaggaatgtttatcctacaatcctgatgcttccatggagaagtcagggccacctccccaaccctcttccctctcctgcttcctatcaaacataaacaaagctggacactagttaaagtgataattattgaagtggggaaaagagtccagcatgatctaaggtcacccttgatctgtgcagagaggactgggcatttataaatgagaatgagggagtaggaaggggagggggcgagctgggtctcaggagagtcagggaaatgaaaaattataaaaagcagaaagggagggttaatccatgtgaaaccatctgggtttgttagctagtgcttatagaagttaagtttctactctttggcagagaccgggctyctgcaccctctaagactgggagtcagggagccctatcttcaagtgattgccacggaacaaacaacaaattctctgtctggagttttctcaggcaggcactctcagaggggctaggatcatcctacagatgaagcctcgagcttttagaaactgtgttagtgtttgttcaagtctttataggccagggttgaggcctagtcaacaagagagctcattggggcctgacaagagtttgttcaaggggagaatcttggtaagctctcacttcaccctatgagaaaaatgattcattgaatagatgacatttgaaaagggaacygaagatattcagtctgtttcttctgggcattgtccacgggacacaaatgctcttttctgcaactagaggtaaattaaccatccctaggtgggagtgcagagtgcttggatcatctagtgaatggaggatgtgtaaatatgactcaagagtggattcactacgcagttgcagtaatcaagacatgcgggcacaatgataaacatgttgtgcctgtaatcactttgggaggccaaagcgggcggatcacctgaggtcaggagttccacaccaacctggctaacatggtgaaaccccatctctactaaaaatacaaaagttagctgggcatgatggtaggtgcctgtaatcccagctaatcgggaggctgaggcaggagaatcgcttgaacccaggaggcagaggttgcagtgagccaagattatgccactgtactccagcctgggtaacagagcaagactctgtctcaaaaaaaaaaaaaaaaaagaaaaaacagaaaataaaaacaaaaaccatgagatacaactttatacccactaggatttctataaaaaaatatggaaaataataagygttggccaggatgtggaaaaattgaatccctcgtatattgctggtgggaatgtaaaataatacacccacttcataaaacagtctgacagttcctcagatggttagacagaataccatctgacccagtaattctacttctagctaggtacccaagaatatacctagcacatgtgaaaacatatgtccacacaaaacttgtatgtaagcagggcatggtggctcacgcctgtcataccaacactttgggaggccaaggcaggctgattacttgagctgaggaatttaagaccagcctgggccacatggtgaaattccatctctaataaaaaatacaaaaattagctggacgtgatggcatgtacgtctggtcccagctactcaaaaggccaaggtgggaggatcacttgagcctgggaggcggaggttgcagtcagctgtgatcgcaccactgtactccagcctgrgtgacaatgtgagactgtctcaaaacaaaacttaaacacgaatgttcacagcaacatttgtcataatggccaaaaagtggaaacaacatatagttctcatcaactgatgaatggcttaacaaaacgtcgtatgtctacccggtggaatattgcctggcaataaagaggagtgaagtctgctacatgctacaacatggatgaactttgggaacattgtgctgagtaaaaggaagccagttacaacagaccacattttgtatgattccagttatatgaaatacccagagtaggaaaatctgtagaggtgggaggtagattagttattgcaagggcacagggtggtgatggttgtgggaaatgggagtgactgctaatggatgtggaatctctttttggaaatgttccaaacatagattgtggtgatggtcacacaggtctgtgaatgtactaaaaaccattgaattgtacactttacatgggtggattttatgacatattaactatagctcaaaaagatgttgaaaaaagggacttaagtgaggaaaactaagaatgattgtaatagcagacttccacaaatcaagtcttttttcttcagtcgcatatgtcagtaattgatgtggtttggccgtgtctccacccaaaatctcatcttgaattgtaatccttacgtgtcaagggtagtgtcatggggaggtaatcggatcgtgggggcggtttcctccatgctgttctcatgatagtgagtgagtttcacgagatctgatggttttataagtgcttgtcatttcccttctggcacttattgtctctgctgccaccctgtgaagaggtaccttctgccatgactgtwagtttcctgagatctccccaaccgtccagccatgcagaattatgagtcaatgaaacctcttttctttataaattatccagtctcaggtatttcctcatagcagcatgagaacagactaatacagtaaaaaagtctgatattagtgaaatcttcacttgtctaaaatcagtaggtatatgtatctctcagttgagaacctgaaagagaagacagttatttattgaccttctaaaacctccacatattaatgcatagctgagtataccacttaccctctgtgtatcttgcatctattttctatcttgtatccatcctgtgtcagcactgttgcgttgatgtttttaaatcagttcycaacttgcagcaggggagggagggagcggtcagggacgaagtatgattccctatcccagcccctccccagggccccagtccgtgtgtctctgggtcctccttgatgtggtttccgtgcttgaatctattacatttttttccatgacatcatttattctccctgccttccccttcctcacaagaagatctagtttcaggggccagcattccccagtattcccagtgtggtcagattgactttgtgcagttgcatcattcatggcataaatgagatattaataatactatatggctgtcctccagacccatccatactcctggacctccaactcaaagctaagcatcaccacctccccacacttgctcagggagtgttccccgcaacatctgcccaccatgtactcttgcaacaaggtattaataagcgagaaggtgtctagaacttcaagtgaccactagaccaaataaaggttttttcttaatttgaaagatttgattcttccctgagaattcaacttcagaaagaatgaacgaaactaagactttttaagttatttatcatatctataacccattagaattaatagctgtagatcctcatgaaaatttttagttaattttcaacacggtaagaatcatgagcattttaaattaaatggaacactagatggcaaatgaatgctttaccttattaagatgattcaatgtattccatagtttttaggccacttctaagcagtatttcaaggaaacatacttggtagtaataaaaaaawtttttgtggcaaataaacaattaaaaatgaaagatatgcacatcaaactgtgattcatttttataagtttaatgaagaattagctatatgataattcttattttgtgacagttacattgttattgtattcaagaaagtaatacctacaaaaatagcaaattttgaaaaagaagatagcaccaaagaacaaaaatgtcttgttttatatcagtcacacaatgcactttctctaggtgttaaattagtaatacagtatatgtgtgtacatgtttcccattcagggatttgtgaccaggtggaatgagggtggtctctgagtcacctggagagctttataaaactccaccttaccctcatccccaatagtgctccccagcctcccaccaagatagctgaatgtcagaacctagagggaagagggtaagatgggtgtggtacgtggatgaattggccagggactcctggggctgtgcaacccacactctcctcatgttggtggactgtgaagatcaaggatgtctggaactttttccagttgagtgctatggacttgagaccaaagttaatttggaaaggaagtttggggtagccattcataaatacatgtaatagactcctcttgaaggactacggaacagatgataggcctccaagagtgttagagtaagtgagtatgaatccgtccattttcagtaaataaatgattgattccctggcttccaggaaaacaatgaaaaacatctacattgcctttgtattttttaaatcagcaaattgagcttactcagattaccttaggcttgagagagatagaaaagtattgcaaagtagtctgacattggtgggaaaatggagttgatcccacacaaaaactatgtttagggaaaaattgacattaaaatggaacaaatttggtagcaaaataaggagataattcagcagagaggtaaactgctctttattaaggagcaagcttttttttttcttaagttgttttatttgtaacagaaataatttcaagttagaacctgtattttccttctttctatctttttaaaataaaagtggcgggttcattttttccatagcatacctcctcctgccctgccattccagttgtcagtggggtgctgagaacacactcttctattgaaactgagttttctgtcatctcattccccaagcttccctggaagattagcaggatggaaaacctaggtttaaaataagaactaacttatcaatcataggctcttttaaattgaggaagtcttttttaaaaaaaaaaaaagttggtagtgaaaacacagaagaataattacagtatagccatcaatctagcagagttgagtgtggtcttttgtgaaaccatttgcgtagacttgtaaacaacttcaaatagaaaactatctaatcataagaagattgtaaataccaaaataggaggctctaaacaggtaaaaatattktaagtaacacttatctgcttagtattaactagaggtaatagttacatttgggcaaaactgaaattgtatttgattcacttttttcatcactaattacattacttctgtagcaaagagtgaatggtttgggttctcttttgccctgggtaaaatatcagttccgggtaaaatatcagttccaaacttccaaggctttttgtggatatcatagctttatgagggttacaaaaggtcaaaacccattccaaaccaatttttgacagttctgaaaaactctgtgaaaatcattttgcctcctcctgttttatatagtctgaaataaatatcaaggaagtctttcactgcagactcatatttgtttcatacaacagtttccttgtaaagttcatctataggatgaattgcagcctgtttgttccactgtatagaaacaattcaagattctaattttgagtgtagcagtggtgctccttctatagtgatgaactttacactttggaaatgtcaccaaggagctcaagcaaaaaccgaacagttccagtggtgagtgaaatccttgtttatagtgcctgtgtgacttccttaaaacagaaaagcacaacagagatgtgagtcacaacacagaaacttggaaaggcttttcacagaaaataggtaaatactgcagaaaaggagatatttctagagttgatttatgagacaaagagttgatttatgatctaaatgttcgctatatattatattgtgctagtatccttttaccaaatatgttgattaacaaatgtaggcattttccaggataaagattcatgttaatgggatgagatatgtaacttgatggttacagaatgcagtaagacatagagaaacataataaacatatatatatatatactgggatcttgaccatgtgagtccatgaaagtctgkgaggtttttttttttttcttttttgagatgaaatcttgcactgtcgcctggcctggagtgcagtggcgcagtctcagctcactgcaacccccgcctctcaggttcatgtgattctcctgcctcagcctcccgagtagctgagactataggcacacaccgccacacccagctatttttttgtatttttagtagatacagggtttcactatgttggccagactggtctcaaactcctgaccttgtgatccacccacctcggcctcccaaagtgctgggattacaggcatgagccaccacgcccagccaagtctgtgagtttttattgcaactaagaaggaatagtcataaagggatttgattttgaaccaagactgaaaggaactgaaggctactttttggcagattaaaaggtggctgccactgtatgcatattggatcagtctgaacagagatattaattttggagggagaaccttatttgaagtacagcagatagatttgcttgactggtatggaaagcaagaagggttctgtgatctctttgatagttgtgacgtaataatggaaaggctttatttcggtcagacgataagagcatgaattagaagtcctttgattgttgcagatgaactgtcacatcaggaaggcattctggcagtggctggagggacagataagttagcggggagtaactagactatgaaccttggagaaaatgtagtttaagtatgaatatgaatatgaatattgaactctgattagtgaataagtggtattagtttcctgaaaaaaaaaaaccctccatacactcatacactcctgtcaacatgcatacctcatagtacattcactttcgtaggcttgattcatcataagttctgaaattgttaattataaatatattctctaaggactttcagtgtgcacagcatatacgtatatcaagtagaaagtgtatctttttatcatgaaacttacataaacataaacctcgtagatttgtgtatttttgtggcagttttccaacagatgaaaataagtgtcttgaggaaggaaggggcgggctctcttttctaattgcacagaggtacaatgtgggttagctgtggccttggatggtaacctgcctgactgctctcttcctcctgatgtgacagccctgagttccatttcatatctagcrctaagtttccaagaatgagattcagaagtttgggtgaggggagggggagcaacaactgtacccaagtgtcagagccaggctgcactcaggcctgaggctcagcttttaggaaccaaggtctagtttcagggataagaatattactggtaggaagcctattactgtgtgttttgaaagagggggctttgtaattcttttcaagtcacaggactccatcccgtgggggtatctgtggaactgctgaatctttaatgacgtatgatcttgcttcctgtaagttaagtttgcctggtagtaaccattgtacctctctcagaagaaccaagatatactgttatccagaaaagaaatctcaaagagccaacaatctttctaggatattcatgcctttcctataayaatgttttctgaagttatgtaatatttgatacaaacaaaaggacatacgtaacctacataaattgtgcagcataacaataatcaacttcccatcttaaaaacagaatacttctagaaccttttcccctaactgtagtcttctgctcattttatccctgtgtctccagaacagaggtagccaatatcttcatttttatgtaaatttttcctttgctcttctcttacattgttattaaaatagttttatcgcatacgtatgtattcttaaaccatttccttttgcatgtttttcaggtttrtaagattgcatcatagtagtcctgtgggacttgtttttttaattcaatataatgtgtttctgaaacacattatagctcatagccatagctaattctgtagtctaactttccattgtagggatatttatctgcttttggctcagtaaatatttggattgtttccttgcttttcttttttattcttttgacaataatgctggtaaagacatttctgcacatgtctcctggagcccagtgggaagaatttctctaggartgcatttttcaaaccctttagatgcagcatgaaatgtattttcrttgttacatggttattacatgatacaatccatatcttttaaaatccattttcatgtttcttttctattctctttcattaaaacaaatgccactgtgatatgacctagggatacagcctgcactctgaaaaaacactcctccaagacagaacttctccaacttcagtgtgcaggtgaagattcagcttcaggaggtcagaagtagggcctgagtatctgcattcctagtaagcttccaggcgatgctgctgtgctggtgtgagaaccaacactattttgaatagcagggctctaggctctttctcaaatttctctgatgacaagaatcacccaggctgcttcttatgatacaaattctggggcttcatcacaggcccmacaaatctaagtctctggggatgaggcctagagagttttatagggtcatgtgttgcataatgacattttggtcaaccgcagaccacatataccactgtggtcscatatgattataataccatgttttcactgtaccgtttctatgtttagatacaaaaatagttaccactgtgtttctgttgcctacaacattcaatacagaaacatgctcttcaggtttgtaacctaggggcagtaggtggcaccctatagcctgggtgtggagtaggctctactgtgtaggtttgggtaagtgcactctatgatgttcacacaatgaaatcacctaacaatccatttctcagaatgtatctctgtttttgggagatgcatgactgtatttttgaaaatctgccaggttattcttctaagtgaaggaatactattctaggatttatgcctaagaatataacagctggattgtattctaaggttagctttacaagatgatgccaacttgtgttccatagtggctgtaccaatcccactctcattaatgatgtataacacattgcattgatctacattctgccaacaatcagtattaccagactttctaatttttgtgaatctgattggtatagaatggaatttactttgactctaatgtgcatttctcagattagtattaagcttgagcatattttcacgtttgtggtctataattttcctcttcttcaaaagtcctgttcttttaccaacttttcttttgagttgtcagctttttcttgtgattggtggaagttctgtatataatcaatatctctcgtttgtttagtggttgccaatgtcttctattctgtgctttgccttttacttttctactaaatacctctttatatcatttgtctttattgtgtttggttgttttcccttctttacaataataaggttttagcttaggttttcactttccttatgatacattttgataaatatgttcttaattttagtgtagcataaattatcaagcttttcattgatagttggtgcttaagaactatttctttgccctgtaatcagaaaaaataatcccctacattctttaatttaaaaaattaaatttgggtttttgtgcttctaattgagtcagaattgatttttgtatatgatacagagtaggaatccacttctcctagcaccacttgtgtttcccccaggaatcagaaacaccacctctatcatatagaacatcaggatttctgttgtgctccatgtctgttctttcagcaacaccacactgtgtagttactgtagcttttaaataactcttggcatctgatagaacaaattttcctacctcattcttcctacggagtgttctgtttggggacctttgcacgtctttatttacttyagaatcaatttatcaagttccttaaaactctaattaggttttaattgaaattgtagtgattctatagattagcttggggagaactgacacctttaccacattgagtctgcccattcataaacatggtataactccaattattttggtcctcactaatgtctttcaatgaggttttggatttttatctrttattggtgtcttgtaagatttattcctgggctccttatatcatttgatcttgttgtaaatgaaaaaaattcagtaatgtttcagtttgataatatacaaaaaatgcagaggagttcaaaattaatcccctatttggtcaccttgctgacatttgctatttttgtataacttgtaggtcctgcttgtttgccaagcctgtcacattgtctgtgtataattaaagtgctgttttttcttgtttcattcttacacttttcatttcttactgtactgaatggaacctccaggaaaatgttatagtgaaacagcttagatttattttttgtaaacagattatggcacgatgttgattttacctttaattctctgggcattttaatagacaatattttatttacatgtattgtcattactagtatatactagtagtaatatatactagtagtagtaatatatatatatatatatatatawtactactactagtggtagacttctgtgtaccacttttctgtttgctttctggtttttcctgtttttctacatttcccctcaccccttgccttttttcttttcttttgtttttttcccataattgactgaaataactttttttctttagatgagttacttgttactgaaggtattatcctatggctatctgtatagtgattaccctagagagtttgccttgcatacttaaagtttatagttgatatcttaaacttcccttcccagtgatggaaagatcttacaacactgtaactctgagcattgccctacctgtgtgtatgctcttgttgtcggcagtctaattctgtatatataaaaagctctaaaattagacagtattgttattttacaaacataagtttttatgtttttttgctcaccatttcttctagcatctcagaccttctttcaaaactcatttttctttttgaaggtgatcctttattgcaggttcattggtagtaagttcactcaggtacaattctttgaaattagctttattttgtcttgatccttgaatgatagttttgctacgtatatagttctaagttgacatattcatattttctctttgtactttgaatattttgttcccttgttttttgccttccactgttgttgtctagaactctttgttcaatctgccattactttgtaggtgatgtgctttttctctctagatgcttttgagatcatctctttgattattttggtgttggtggtttaactacattatgtctaaatgtggaatttaatttttctatcttttgtatatgttatactttctgtatcttttgactgatatctcttgtcaattctggaaatttctcagacattatgtcttcagttagtgcctctcctctattccctgtgttctacttctggaatgccaattagacatagatacaccctctaattttgccctccatcttcctttcttattttctattatgttcctatttctatttttctgtgctacattctagataatttcctctgatccatgcactacttcactaattctgtcttaagctgtgtccaatcttgctgtctagttttatacagtacataattaatgtcctatccattgaggtttttgttttatttcaacagtgtttttatttctaaaagttacgttagctgtttttaaaattggtcattttcagtgacgtattacatgttcatttttakaattacatttttaattttagaagtggcacgcaaattttatattctgaatctggtaatttgagtgatgtgaatctgttgtttcttatctcttttgactctgtcagggcatcttgttttctgttatttttgttaatctttactagtgagcttatatttgggtgggctttatttgtgaaagtaggaggcctatatttatgtatcagtgtgtttatagaagatttgtatttgtgtttgctggaatcaggagatggtactgactgcagatactttacacactgttattcgtatgagattaccttgagaacatcatatttggcttccctgcccctggcccatggcttaatctttggatgccggtgctgatatagacaactagagttccaccttaccctttgttttggataagggacatggtgtaaggtgttgctggagacacactacatcctacgcaattaaaaaaattgtcttataccggatctagttgttttcaaatgggagagtccttgagagtaaatgatatgccattctgttataatcagaaattgtaataattactttatggatgtattcttcatttattaatttatctaattatttgatgagtctgaatattttgctttcatacaaacacaataataatatgatataatgagtggttgttgagagaaattcttaacataaacctttgtcaaatacagttgctatagccaaagaaagaaatagttctatgtattgtaaatctctatttgaaatactatgccaaataaatgatgcaactcataatcgcacattagggctggttgcagtggctcatgcctgtaatctcatcactttgggaggccgaggcaggtggatcacgaggccaggagttcgagaccagcctagtcaacatggtgaaactccgactctaaactacaaaattagccaggcattgtggcaaacacctgttttccctgctactcaggaggctgaggcaggagaattgcttgaaaccagaaggtggaggttgtggttagctgagattgtgccaccacactccagcctgggcgaaagagtgaaactccatctcagaagaaaaaaaaaaaaagataaatgcacattagactttgcttatttacatttaactggaaccattactttaagatctgtccttcggagccagtataggcccatagccttgaaatgcagccttttttagcaaaaaaaaaaaaaatggaacatctgaacattgtttttcttttggagagaagtttgacattgtctgttgtacttagagatgtataacatctacaagtcagcagtcttacttttaacatgcactaagggaaactggccaggagggcgtatagacaaagatgctgctcatagcactgcttgtagtagagaaaaggtaaactcagctatcttttctgcagtaagggaatggataagtaaactgtattttatttatttaatgtaattctagacaccagttaaactaacatagcttcaactctgctatattgaatgaaatctcatgttgcaaaaaatagtagcatttttgaaaatttttaagcatcctagatatatataataaaagtacaaaaccatgtttgggaatgatagataataacctttgaataggaagtaggaaggtggcaaaattttatatcagtaatattttatttctttaataaaaagtgatctgaaacaaaacataaaatgttaacatttgatattagtggatacacagaatattgttttattttgtacttttcaatgtgttttaaaggttttattacttaaaacttcaaaaaccctaaacaccaacaaaaaattattctgtttaaaatgaaaacatatttcaaccattgttgtgatactgtgatacttcttttttttttttttttttttttagctattcttttttttttattatactttaagttttagggtacatgtgcacattgtgcaggttagttacatatgtatacatgtgccatgctggtgcgctgcacccactaaatcgtcatctagcattaggtatatctcccaatgctatccctcccccctccccccaccccaccacagtccccagagtgtgatattccccttcctgtgaccatgtgatctcattgttcaattcccacctatgagtgagaatatgcggtgtttggttttttgttcttgcgatagtttactgagaatgatggtttccaatttcatccatgtccctacaaaggacatgaactcatcattttttatggctgcatagtattccatggtgtatatgtgccacattttcttaatccagtctatcattgttggacatttgggttggttccaagtctttgctattgtgaataatgccgcaataaacatacgtgtgcatgtgtctttatagcagcatgatttatagtcctttgggtatatacccagtaatgggatggctgggtcaaatggtatttctagttctagatccctgaggaatcgccacactgacttccacaatggttgaactagttgacagtcccaccaacagtgtaaaagtgttcctatttctccacatcctctccagcacctgttgtgtcctggctttttaatgattgccattctaactggtgtgagatggtatctcatagtggttttgatttgcatttctctgatggccagtgatgatgagcattttttcatgtattttttggctgcataaatgtcttcttttgagaagtgtctgttcatgtccttcgcccacttgttgatggggttgtttgttttcttcttgtaaatttgtttgagttcattgtagattctggatattagccctttgtcagatgagtaggttgcgaaaattttctcccatgttgtaggttgcctgttcactctgatggtagtttcttttgctgtgcagaagctctttagtttaattaggtcccatttgtcaattttggcttttgttgccattgcttttggtgttttggacatgaagtccttgcccacgcctatgtcctgaatggtaatgcctaggttttcttctagggtttttatggttttaggtctaacgtttaaatctttaatccatcttgaattgatttttctataaggtgtaaggaagggatccagtttcagctttctacatatggctagccagttttcccagcaccatttattaaatagggaatcctttccccattgcttgtttttctcaggtttgtcaaagatcagatagttgtaggtatgcggcgttatttctgagggctctgttctgttccattgatctatatctctgttttggtaccagtaccatgctgttttggttactgtagccttgtagtatagtttgaagtcaggtagtgtgatgcctccagctttgttcttttggcttaggattgacttggcgatgcgggctcttttttggttccatatgaactttaaagtagttttttccaattctgtgacgaaagtcattggtagcttgatggggatggcattgaatctgtaaattaccttgggcagtatggccattttcacgatattgattcttcctacccatgagcatggaatgttcttccatttgtttgtatcctcttttatttccttgagtagcggtttgcagttctccttgaagaggtccttcacatcccttgtaagttggattcctaggtattttattctctttgaagcaattgtgaatgggagttcactcatgatttggctctctgtttgtctgttgttggtgtataagaatgcttgtgatttttgtacattgattttgtatcctgagactttgctgaagttgcttatcagcttaaggagattttgggctgagacgatggggttttctagataaacaatcatgtcgtctgcaaacagggacaatttgacttcctcttttcctaattgaataccctttatttccttctcctgcctgattgccctgaccagaacttccaacactatgttgaataggagcggtgagagagggcatccctgtcttgtgccagttttcaaagggaatgcttccagtttttgcccattcagtatgatattggctgtgggtttgtcatagatagctcttattattttgaaatacgtcccatcaatacctaatttattgagagtttttagcatgaagggttgttgaattttgtcaaaggctttttctgcatctattgagataatcatgtggtttttgtctttggctctgtttatatgctggattacatttattgatttgcgtatattgaaccagccttgcatcccagggatgaagcccacttgatcatggtggataagctttttgatgtgctgctggattcggtttgccagtattttattgaggatttttgcatcaatgttcatcaaggatattggtctaaaattctcttttttggttgtgtctctgcccggctttggtatcagaatgatgctggcctcataaaatgagttagggaggattccctctttttctattgattggaatagtttcagaaggaatggtaccagttcctccttgtacctctggtagaattcggctgtgaatccatctggtcctggactctttttggttggtaaactattgattattgccacaatttcagctcctgttattggtctattcagagattcaacttcttcctggtttagtcttgggagagtgtatgtgtcgaggaatgtatccatttcttctagattttctagtttatttgcatagaggtgtttgtagtattctctgatggtagtttgtatttctgtgggattggtggtgatatcccctttatcattttttattgtgtctatttgattctcctctctttttttctttattagtcttgctagcggtctatcaattttgttgatcctttcaaaaaaccagctcctggattcattgattttttgaagggttttttgtgtctctatttccttcagttctgctctgattttagttatttcttgccttctgctagcttttgaatgtgtttgctcttgcttttctagttcttttaactgtgatgttagggtgtcaattttggatctttcctgctttctcttgtgggcatttagtgctataaatttccctctacacactgctttgaatgcgtcccagagattctggtatgttgtgtctttgttctcgttggtttcaaagaacatctttatttctgccttcatttcgttatgtacccagtagtcattcaggagcaggttgttcagtttccatgtagttgagtggctttgagtgagattcttaatcctgagttctagtttgattgcactgtggtctgagagatagtttgttataatttctgttcttttacatttgctgaggagagctttacttccaactatgtggtcaattttggaataggtgtggtgtggtgctgaaaaaaacgtatattctgttgatttggggtggagagttctgtagatgtctattaggtccgcttggtgcagagatgagttcaattcctgggtatccttgttgactttctgtctcgttgatctgtctaatgttgacagtggggtgttaaagtctcccattattaatgtgtgggagtctaagtctctttgtaggtcactcaggacttgctttatgaatctgggtgctcctgtattgggtgcatatatatttaggatagttagctcctcttgttgaattgatccctttaccattatgtaatggccttctttgtctcttttgatctttgttggtttgaagtctgttttatcagagactaggattgcaacccctgcctttttttgttttccatttgcttggtagatcttcctccatccttttattttgagcctatgtgtgtctctgcacgtgagatgggtttcctgaatacagcacactgatgggtcttgactcttagatccaacttgccagtctgtgtcttttaattggagaatttagtccatttatatttaaagttaatattgttatgtgtgaatttgatcctgtcattatgatgttagctggttattttgctcgttagttgatgcagtttcttcctagtctcgatggtctttacattttggcatgattttgcagcggctggtaccggttgttcctttccatgtttagtgcttccttcaggagctcttttagggcaggcctggtggtgacaaaatctctcagcatttgcttgtctgtaaagtattttatttcttcttcacttatgaagcttagtttggctggatatgaaattctgggttgaaaattcttttctttaagaatgttgaatattggctcccactctcttctggcttgtagggtttctgccgagagatccgctgttagtctgatgggcttccctttgagggtaacccgacctttctctctggctgcccttaacattttttccttcatttcaactttggtgaatctgacaattatgtgtcttggagttgctcttctcgaggagtatctttgtggcgttctctgtatttcctgaatctgaacgttggcctgccttgctagactggggaagttctcctggataatatcctgcagagtgttttccaacttggttccattctccgcatcactttcaggtacaccaatcagacgtagatttggtcttttcacatagtcccatatttcttggaggctttgctcatttctttttattcttttttctctaaacttcccttctcgcttcatttcattcatttcatcttccattgctgataccctttcttccagttgatcgcatcggctcctgaggcttctgcattcttcacgtagttctcgagccttggttttcagctccatcagctcctttaagcacttctctgtattggttattctagttatacattcttctaaatttttttcaaagttttcaacttctttgcctttggtttgaatgtcctcccgtagctcagagtaatttgatcgtctgaaaccttcttctctcagctcgtcaaagtcattctccatccagctttgttccgttgctggtgaggaactgcgttcctttggaggaggagaggcgctctgcgttttagagtttccagtttttctgttctgttttttccccatctttgtggttttatctacttttggtctttgatgatggtgatgtacagatgggttttcggtgtggatgtcctttctgtttgttagttttccttctaacagacaggaccctcagctgcaggtctgttggaataccctgccgtgtgaggtgtcagtgtgcccctgctggggggtgcctcccagttaggctgctcgggggtcaggggtcagggacccacttgaggaggcagtctgcccgttctcagatctccagctgcgtgctgggagaaccactgctctcttcaaagctgtcagacagggacatttaagtctgcagaggttactgctgtctttttgtttgtctgtgccctgcccccagaggtggagcctacagaggcaggcaggcctcctagagctgtggtgggctccacccagttcgagcttcccggctgctttgtttacctaatcaagcctgggcaatggcgggcgcccctcccccagcctcgctgccgccttgcagtttgatctcagactgctgtgctggcaatcagcgagactccgtgggcgtaggaccctccgagccaggtgtgggatatagtctcgtggtgcgccgttttttaagccggtctgaaaagcgcagtattcgggtgggagtgacccgattttccaggtgcgyccgtcacccctttctttgactcggaaagggaactccctgaccccttgcgcttcccaggtgaggcaatgcctcgccctgcttcggcttgcgcacacccactggcctgcgcccactgtctggcactccctagtgagatgaacccggtacctcagatggaaatgcagaaatcacccgtcttctgcgtcgctcacgctgggagctgtagaccggagctgttcctattcggccatcttccattgtgacacttctaaccttatttttgtacagttcatcattcagggagaataaaatatgacatgttatcattattaagtgccttaccaatacccacatttctttattttggaaggtatcaacagtaaatttctacccctctttttccaacctctctattcaataacacttttattttttatggatttaggggtacaagtacagtcatgcaatatggatatatggcgtagtggtgaagtctgaactttcagcattcaacaagctttttacttaaaaatttaacttaaaaaaattctcaaaatatttatcctgaaagacttggtgaaattattctgaaaccagataccttgaatgactagcccagggtccagtatgtattcttttactttattttttaaatgtactagccaaaccaagaactaagcaaagcatttggacatactgcattacctaacattcaacattacctaacaccactagggagtgctccttctaggctgtcaattgtggcctatgtttagagtgttattttcccttacctgagatctgtgttcttacygtaagtgtatatcctagtcattttattatacaagataatcctgaatgtttgccataacatgtaaataagaattccagctttcaaatatgatggaagtttaaatgattagttttttaaattttaaatttaataatttaaattaaattatttagttgctatgtagataatctatttcccagcgagatggggcagtagtttacttacctttacaatttaagcggagttcaaaccagcatttggaatacaagaaagacatggtgagactatgtccatcttaaaccaagaaataaagtagaatgattttgtgtagactttggcattgttacactttccttcatttattctgtaagactattttttttttttgcttctcttaaacgagtactgtttttgaaatttggcctatttgttaggaagatactattctcccttatataggattgtatgattttttgaaraaaaacagattgtttccaagggcattttttgatttttgttatgataaaatgtgaaaactattaatgtgatatctatgaaaagtattctggaggaaaaatatattcaaatttatataatttttaggataagtttgaattcgttccattacatcaccagtacatagatgcctgtagggcagtgtaaattaaagattgttgtatcccagcaatttcagcttgactgacaaggtactttttaaactctggaaagcactgaccaattgaaagcctttaactacttcacctaaaaacaaggccatgtacccagaatcgttgctgcctaggaatactgaattttggggtaggccactataatattagttactcagacctttgctctgatttcactaaatagtaaagtaaagggagctattgctttattattttgtcaccctctagtgtgacyggtgaggcaggagtacagtagctggaggtcctgaaggggcccaccatgccattctggttgttattccctttattgtaatacacctccatagagttcattgagaggtagaaaagagaaacctgttagtgggagcattggttgtaatctatgtttttgattatcaatgacatgatcctaaaattatacccaaatatctctcacaggttctgaaattgagtttctgaaaaagcactgtagtagtaataaaaggtaaagtgcagagttccaaagaaatgagctgtgaattgaacctgcaatggaaattgatcctatcagtcagtttttgcccttgttcatagaaaaataggactgaatgtagaaggagccaggatcactgattaaataggatgctgaagtgctggaggctaraagtgggcttgctcgtcccttaggtcagacttctctgctggaaacctggctcaagctggcagaaaaagaacagaatgaaaaatgctgcaggcatcagtgggagagtcggtaagagctcactgactgagcttcctgcgtgacagccagtgcacttctccatagggaggccattctcatctcttatcatgagtcagtgggcccacagtggacccactggcctcatgattcatgccaacggggcctgtcatgataccctttcagggaagcagggaggcatcagtgtggccagagggtgtgagtgtgaagaaaaatggctttgctatcaattccattctcagtagcatcctcaggattgtgaggaaagaggacaaatttcctacaactagtggtcctatgaataccatttattacccttttatctaactgtaagagatctatattgtgcacatagaatgcttgtaatgctgtgccaygttttggggggacagtgtttgtattctactcccagaaatgcagtgtgagttgcaattagcctaccaaaattacacatttctggttatgaagttgccatttgtttcctacagtgtaatatatttctacagtgatgcccttcagagtgttcagtgatcatcagtataactcactagagtaaatgtccctgtggaatgcctcattcacagttagtagcacactaatggaaatcgctctgtagaaacattgaaaacaaaggtattataaaacactaacttgagatgtaattattataaatccatttctggatcagaatttaattttgcaaaatggcagaaaaaaaagtaaaaacaaagaagcattgaaatcaggcaatttgcttagtatgagaattgtaaaagaattgtatgagaattagtaaaagaattgtcagatttccttagtcattggtcatagcctatcaacactatcattaaagaaggctgctgtcataggtacatggtagcacatggcatttcctttatgttattgtatgtatctgcttttccagccatttccccatccctcttaactttgcgtttggaccctggtaagagaaaatgacagtactcyatctgaagtggaccatgtccctgtgtcatggtattgatttaacttatcctgtaagcttttgacaaatgagaatcagagtcaaagaggccttcatccctatcctatgttgacgtgacccttcctacccccattgatattgaccctgccacgttgatagcaacacattagtaggcacagcagaactacagaccatagtcaaaggctcacagagggcacaaaggaaaatactctgcaaaagcttccgtaagatagttttgctttggttaactgtagttatgcttcaacgtaaagatgcaaaaaagtgagtgtcaccctcttttcatctaagatttagacctcatacagcctctgtctcctgtctgattaccactcatgacaataggcaatttagagcctttgtcatagaaatgattgttttgtgttaggcttagctgtagtacttggcaaatgtatgggaaatgtgagacataattttaccatgatggaattctaaaaggtgctcacagagaaagggagcatgcaaaaatacttgaccggtacacagacagaagcctttgttttcagtcctgaattttaatttaagtatatattttcttggataaggaatactgaatgatgcagacttatttatgcagtgraaaatagttttccattgaaattaagttagaactgtacttcttgtttaaactaatatctgaagcctttagtcattttattagtcagtaaaattgatgaaaaccttaggaaaatgcgttagaacagtcctgtgatgaataggaggcctgggattaataaggaaaarggcaaagggacacatgttgatctgtgtatgtatagagatctggagcttattagaagtttttatgaacattcaactaatgaagcattatataaaattagacatttccgttaagttgtaaaagttactagtctagggaaaaaaaccttcaatgttatttctaaataatttatttatgacattttcccaacagtagtaatttaaatatgaaaaattaattttgtaatagggaacattccatgagaatgccactcacgatttcttggaggagttttcatctttggttcttagatttattacaggacagagtagcatgaatgatctttattaatcccattttatgattgcagcagatatctggtaaatgctaygttgcatatttaacattattccattttaaacattttcatttgtcagaggttgcaggtaaaaaggggggattttaagttctctctgtggcataattgatggagaaaacagacacaaagaatttatgcacaaataggaatcaagaagggaacttcaacaatagtctagacaagtttgcagcaccctgaaatgcaggccaggctctctggtacagctgaactggggaatgtggccttgaccctctcgtctatagaattagcaggaaaagggggaagaattcctctcagcacttttgtctcaagtttaaattcattggatctttattatattgtacattctttggtcatgttttaggtgaagtcttagtatctttaatatcctgatttcttcttatttgattctctttagtttggtagagaaaacagtggagtggggacagcatgatttgtagttgtcaggtctaaatttgaatgccacagcaaaccctgaccctgatcaagttattgagcctaccttggtcacaatttttatgtctatatattagaaataaaaatatttacaggattattttgaggaataggaaatttatagaaagcaactcacacatagtaagtgtgcaataaactgtagcttttatatctcaagtttattgtcccttctcaattgtagatctctttacattcatatttggtgagcacacttcagacaaacaaaaatcaaaattatgaatcaaatgacctatgggtgtataacacaaaacattttaggttaggcttttcctaaaaccctgaatgctgaattttttgtagtagtgcatggtacattataagtgcttggtaaatgttatttatgtagtagtatttattttcatcattatttcataaacaaatttaagctttctctgcatatattttgttttaaattatgcaaaaatgcttatattctctccatgtcatttagatttctaagcttgaaactgtacctggagcttgggctaaaataagattactaaaaaattgtcatgaacaggcaagaattactttagcattgattgtgtggaattctattcagattgaaatccaaaaatacctgctctgctcagaagtttatgttctcttactatattatttcatgtataattctcaagcttttactcttgttttccaattacatgattataaattaatgtttaaagataaaacacatgtatcagtattaagattggtttattttggccgggtgtggtggcacacgcctgtagtcccagcactttgggaggccaaggcaggcggatcacgaggtcaggagatcaagaccatcctgactaacatggtgaaaccctgtctcgactagaaatacacacacacacamaaaaattagccagaggtggtgacaggtgcctgtagtcccagctacttgggaggctgaggcaggagaatggcatgaacccaggaggtggagcttgcagtgagccaagatcacaccactgcactccagcctgggtgacagtgtgagactccgtctcaaaaaaaaaaaaaaaaaaaaaaaagcagattggtttattttatcagagacccagagaaaaagaggcttaagtaagatagcatttaatttttcctaatgacaagtttggaagtaggaaggtcagggctggtatggtagttcagtgatatcagagaccctggctcctccttcatcattgctttgaattcttaacatttaagtgtctcatggttcaccatggctgcctgagctccaaacatcatatcctccatccagctaataggaaataagaaggaccaaagatggtgagcccctgccttttaagaacacctctcagaaactattttggacatttcatcttatatgccattcatcagaacttaggcacatggccacatccatctgcagaaaataatggaaactttcatctttattctgggtagccaaatgcctagccaagatttagggatttattatccaggaagaagaggagaccaggtggtggggacaactgggaatatctgtgacctttgggattgacctgagcctttatctttcttctctctcatgttttcttttgtcttcttttctaaatagatcccatgcgaggcccaagaaaactagaagtagtggaggtcaaatctcggcaaatcactatccgctgggagccatttggatataatgtaactcgttgccacagttataatctcactgtccactactgttaccaagttggaggacaagaacaagtgcgagaagaagtaagctgggatacagaaaaytcacaccctcaacacacgatcactaacctgtcaccatacaccaatgtcagtgtgaaactgatcctcatgaacccagagggccggaaggaaagccaagaactcatagtgcagacagatgaagaccgtgagtacctttgaatgatatgtttgtgtaaaacatgttctttcaaaaaacaacttttgtttcgagatctttgctgtgcagatggaagaaagaactacttattttgttgaacaacacaaatgtgtatctgtactctgtattcttaagcgctgattgaaagagggaaaagggagtagagatatagaaatgtcattctttattactcatacagttacttttctatatataatcattccatattgctctcaatagttcttcaagttttatttcattgggctgaaaaattgttgttttgggtattagattatttatataaaatcattggactgaaaaattgttgttttgggtattagattatttatataaaatgtttacctaaatatatttaaatggcattctgaaacattttcmtagttcagataaaatttcagcactaaatagrggctgcccttgcttttcaacacagtcttgagaaactgtaagttggtggtcatgaaacaggtcatttttctccacaggaacaatgttgaaaccggatgttactttaataaacaactactttacaaataaaccatgcatgtcaccagtaacgcatcaaaaaagcaaatatacaggaaacctccatagtaatttaaaacagtaaaattatgccttgaatctcaatgcgtggatataaatgtttctttacacagatgacacagggaacccttgtgtgtaatgacatattcatatagtacataaaatacaatggtagtatatcataaatttgacctaaaaatcatttttccggcatcaaaatgaatgacaaagaatgtaggaagaccattaaacgaatgaactgactattcctaagaaaaatagttgtttagctttttgtttcttcatgtaactgataatgtaattttgaccattgattaaattgtgagttgaatgtttagactactttatcgtttcatttaaagagctaaaaaagtatttttgagtgtttctacctacccagcacctgcgtatttttgtagaagaaaaacatagaaatagctggagtagatgaggaactcactgcacatcctttctttcctcttttattgtccctcaagtcctgcttgtgttggttcctctcaagcagttgtttgagagggagtctaagtttgatggaagccactcaggcaaggctgagaccagaagctctatttctgtttcttccaactctctctcatctcccagaagaggagaagatggtgtccacattgtcatcaagttatggctggctccttcctgccttacatttctctattgactctggtcctaacatctgttgtttctacttccaaagttttagattgttcttttctgtcaatttccattggctgtattcaaatccttattattttatgctgaaatttctataattgtttctaccttttctttgtggttccagcctttttctattctaatgtccccctactcactcactmactaatcttaaaaatgtattttcatcttggctgtctctctacaaaagtcttgagtggctcttcacttaatcttcattccagtgccttggctgtcaaggtcttctgtattcttggctcatattctaggagtaataacttctccttcacagcatcttgttctgcaaagccatccctgagtgctggtccctgtgcctgctctgtgcatcctgggcttcccatcgttgcctgattgttctccttggccagtcggggcctctcctggccgcttctcaagctcgcctactctgctaccagctgaagctctcctcacatttcaggtccttcacatagctgtctccagctcttcagtctgtgttattcacatccctctgaccttaattgtacttcataagatccttaactctctgaccctcaatttcctgatctgagaagtgagaataataacaattcttagatacattagggatagaagaaatttatgtggagagctggttgtaggctgtcagaaaggggcctttcttagtattgtaatgattcatagccactcatgattcttctttgctccctcattatgttatttrtatgtatttttttctttttattgtaaactacttgacaagaagtactgtctgtttttcttctatagcaataggcgtgatattgagtaagtaataaacaccccaaaataccttaggtctttaaatgaaataataaagtattgttgataagcatttarttcatgttttaataaacaataatggttacatcaatgagagaaataaaatgcagtcacttccagatatatattgctaaagcatgaacctattgaacactatgggtttcaaattgagaactgtcatgagctaggaattctgttaaattccatcaaaacatgaggacagaattactttgtttgtttaaattatcttgctagtccctgaagctggagcatgcattacttccaaataaaaatctattgttttyctagcacactagcgtttcattaattagaaaaaactttaatttcaaattatattttgtaacccytccaaaaaaaatacttcagaaaaggcagagagaagaaagaaatagaataattgtcaaacagtatccagtttgaagagaaaagaattggggagtcactttgtttatccatcaacaaaagttataattcattgaacattgtgagttttattatagtataatacttttattgaaatacagtttttttcatcagaaattgtgtgggaaaaaatttacctttcattaatgttagtagaatcctatacagcccagggataagttgtacamacttaggtattatggctttatatcccagatcctgaattcccagagcttctaaaaataggtactagacctaagttactatgaggtactatcttccgtaacttaattagtagtatattaattatttattcatattgttttaatttacattgtctttctctgaccttaaagtgattatctgaatccccattagggtttcctgtcaactattctactgccatttaccacagggtcaccaccagtacattctaataagtccatccttctgagatatcctcttcctaacatgattttgaatacctcctgtgtcatattactgttagtattttcttttatacgaattgaatgaaacaaatatttgttttgtctaactcttcaccttctttacatctgcacatggattaacacatattttcaaataagaaatatcactggctgctccgcctatggagtagccattcttttattcctttgctttcttaataatcttgctttcacttaaaaagaaaaagaaatattatcacaaaatagagtcactcatcttagttatcttgatggtgtgagaaaactgatgatgtcatcatcataaacactttcaaggttaagaggaagagacttagtcgagttttctcaggcatggcctgttttagttcaacttctaattatgatgaacattttagtctcagagcttggaattccagtgttcttagaactcaccagtgttgtcatttctaatgttttttgttgcttcaatgtagtcgtatataaatttcttcaacataggactaacaattattttcatatttatgtgctatttagggtttcaatgttaaaattaacttggctgggtatagtaactcatgcctataatcccagtactttgggaggccaacacaggaggggaccacttgagcccasgagattgagaccagcctgggaaacatagtgagaccctatcactacaaaamttaaaaataaattagctggcatgctggtgcatacctatggtcccagctactcagaaggttgaggtgagagatcacttaaacctgggaggttgaggctgcagtgtgcaatgctagccccactgcactccagcccggatgacagagcaagaccctatttccaaaaaacaaaaaatcaacttaatccaacttcattttaggaatgaggcaaatgtgacctaaagaggttcaatgatttgtccaaattgcacaatttaatcatttattagtcttaagtcagaacccrggcctcccatatgaatcagcattttttttgtgccaaacaacacttgactttaattggaataactgtaaatgttctacatttatatataagtagcctctaatctcaaaaaaataggcatactatctatgagtccttttgaaatcctaggcaggctttccaatctgtggtagtcttagcaatcattaaaaaactgctcatatcctctcacaatctaaaacattttttccaaccccttttaaaaaagtttattgagatatgtttgtccattcaccatttgataaatatttgggttgttttcactttttggctattatgaataatgctgctatgtatattcatgaacaagtttttgaattaacatttttttcacttttcctgagtacatacctaggagtgaaattgttgggttatgttgtaaatctaccagtgtttaaccaattgaggcactgccggagtgttttcaaagtagcggcatgactttaccttccctccagcagggtatggggtttccgattactcttccttcttgccagcacttgttatcatgtcttttcgttatagtaatgctagtgggtatgaggtgatatctcattatggtttcgatttacagcgcttgctagctaatgatactgagtatcttttcctgtgcttattgactatttgtttgtcktttttggagaactgtttattcaggtcctttgcccatttctaattgtactatttgttatcttattattgggttttaatattgttacttttacagtctagatacaaatctcttatatatatgatatgcagaagccttctcccattctgtgtcttgtcttaatagtgtcctttgatgcccaaaaggttttcattgtgataatgtacattttatctagattttctttcattgcttttgcttttggtgtcatgcctaagaaattgttgcctgatccaaggtcatgaagatttatttatatgtatgttttctttaagagttttatagttttggttcttacagttaagtctttaaactattcagatttaattgttatatatggtgtgagatagaaatccaacttcattcttgtgcatgtggatatccagttgtgccagtagcattggttgaaaagattaatctrtcctcattaaatgttcccagtactcttactgaaaatcaatgtactgcaactgtaagggtttcttgagtactgggattctcagttcgattccatatctatatctatctatctatatatatawctttatctatgtaaagatatatatgtctcctatgccaacaccacactgtcttgattactgtagctttgcagtcagttttgaaatcaggatgggtgagttctctccgactgcttattggtcattcacttcatcaccaaaaaatgtgatcatgtgccccaaaatatatgcatatttataaacaggatagctrttttgtaaataagataggcatactagtacactaaattgtctataacatgaagcatactaaaaaactacatttaaaatgatgatgggataaataacattttataatgatattgaatattattttatagaaaaytggcaaatgacatcttcacttttgttagtttttttgcaaacttataagaaggtgttatgtattttaagttttgaaaaatggcatcaaacttcccccaaatcacatatagtattaacaaataaaataatgtttaaagactatattgttatttcatctatatcaacttctactttgtatgtattttaatagatatattagtacagtagttcatatatatttttagcatggttttatcattcagtgttatggttataacttgaatccatgtgatatataactgttacttactttcaatcttttcagtattttataacataacttactaaaccatttgacttgtttctcatttattattattacaaaaatcactgctttgtgaacatttttgtatatgtctcctggtgcatatatgcgagaattttactagggaatatacctgcacgtgggaccattgggtcatatgttctgtgcatcttcagctttactaaatgctattaataattttccaaggtggctctaccagtttacacttccacaaggagtatgtgagaattctcatcacttgaaatccttcctcatttcttttggaagagtaaaaacgtttatttaatagatgggactgagctctgtctaattgattaaaacttttaagaaaaaaaatgataaagttattcttttaatcaagacagtgtagctaaaattgtttaagattccagatttttaaagaaaaattgagtatatgtgtggactattaaaatcttttctctcaatagaaggttaaaaccaagtctagaaaaatctactttttaattgtttattacttaaacatttatttcctcccaccctcctttagtcccaggtgctgttcccactgaatccatacaaggaagtacctttgaagagaagatatttcttcagtggagagaaccaactcaaacatatggtgtaatcactttatatgaggtaatatatatgtttgttagtaatttttaattagaaatactcatgatcatgataatgtaggctatctagtatttaaaaatgcatacttacataatatattttaagaagtttaatgctttcagtagttataatggttgttatatagaagaaaattgtaaaaataagtttttgaattatatataatttgaggatttagctttacaatgagttggacctttccagattatatgttattatatgttaagacacagcattacatttaaaaattacctttattaaaaacaataagtattttgaaacatgcattgattataagacaaacacagaattctattcttgcttagctattaaatattttactactgaattatagaaggacactgattatccagttagcaaagtcaataaatattgtctcaggactaacaatagaataatatcttttggtttcttagtattaccaaaacatcctttcgacttctgtgacatagttttgtctactgaggcatatcaaatggttgaatgatagatagcagagaagaatttgatgaattgttcaaggaaaaaagtaacagcaataacagggtgacattcatcatcacatctgtgcaagcatcatttcactatgcctattgtcatagaaacaagcaggtgtgtttttttaagctagcatttatttgaatgcaaattccacaaaattatatgttgtaaagtttctaaaaatcgtggcaaattctcatatggaacctctgcttgaatacctttcagaactactgacaaaagcctgtaaagatgagctgtcagacagtgatcaccagtaaaccccttccctgacccaactagcctcacatttatgtttccttgtaatttttgaaaattggtattgaaacacacacaaaaattaattcaaagctaagcgaagaaagataaaagaaaaaagttgatttttgtactgttattgatgctgttcattggctgcttcattgtaaaagaattgaatattatgaaaattcatggctcagcttttatagagctaagtgttataaacaaatcaaacaagttcatattattttttctcagtgatgagaatcttttagtttttatttttggccccattgccatttttaggtctcagttttgggggatttttacctagtaacaggattttaaactaggaaacatgcaatctttgaaatcaactttaatttccaagccgtaagttcacctgtcctaaaagccacatgttgctatctagacagacagaaaatatttaacagattctttctttttaatccyacaagagatatatctctgtgtggtaagtcactttaacatgaaaacaatgggaataataattcaaaggaaaaacccattagtctctctgattctgcagccaggactacccagttgaacactgatctaaatactactacaatggggatgcatgaatgtgtcataaatcagggttttaaaaatcagatatgtgtaagtagaacagattggttcagttttgtagggaccaaaggggaaatatgtgatccaggccaaagtgattaaatacaagctttctggccaacaagtctttctccctttcccatgttttctacaagtaggaaggaagggagtccccagctccctcgaggtaggtcttaggtggagtctcaggaggagctcttcttgagctgaaatgcacctgtgagctacgattcacccagcctatgccagagtttacaacaggcacatacagcttcctcccggagctgaagatacatgttgamccagattcagtacctctctggagaatcacagacttctgagacaaaatcaygctaaggaaatcaaacacttgccccaaaagaagcagggaccatggcaacattgttttctgtcatggagtcacatttgaatactggtaaaaatcagagggtgagataaattgccatggttggaaaaaagtttagtaaccaatgacacaggtgtttctttaaggraggcagcacacaggataatttttgaaggaaagaagaaagcacagatggaatattgttgatgtttgtattaggccgctcttgtttggctataaagaaatgccagaggcttggtaacttataaagaaaagaggtttaactggcttatgcttctgcagaccgtacaagcatggcacttgcatctgctccaggcgagggtctcaggaaccttatgaatgtggcagagggtgaagggcagcaggcacgtcacatggcgagagcaggagcaagagagagcaaagtagggggtgccacactctcctgtgaactcagagcaagaattcactcatcaccaagggggtggcccaaagccgttcacgaaggttctgcccacatgacccaaacacctccaacattgggaatctcatttcaacatgaaatttgaaggggacaaacatccagaccatatcagtgctggaaatgaatatgctgtagctttagattattctctgttctctctttgcttattatgaaagatacacaaaagcattaatgatcaaaaacggctgacagcattgttttttccaggagttatggcagttcacagccttacatcattcttctggttttcttccttgctttctccttttcactcctctgactccattctcagccttccagcactagccttgcctctctgaccttgtcttcgttctggctcaagtccttctcgtacgttaccctccacctcagtcatttaattttgtcaatcatcttcctacaacctgggtctgatcattacacctttactcagtagctatcaaaatctcttattttgtcgagttgtcaatttaatactgccctctgaaagaatacttgtaagtgcagaagtattcaaaataaaatatccttgcttccgaattttacttttcaaatgtaactactattaacagctagatacacatccttctaaaattttacaaggtagaaactgtagtgcaaattcattaatgaatataaaatggatgcagtttaataaatattatcaaacccagcattttattacaagaataaaataccatatgagactcccacctcacatcatacaaaaataaacaccagattcatgatctaaacacaaaagtttagaagaaccttctaagaaaaaggtaggaagacatttttgttatatatttttctaagcttgatataaaactcagcagtcattaaaaataaagattgacagatttggttatataaaattttaaacttctgaatgatgaaagataccatgaaggaggtctgagtacaaacagaagacttggagagattattttcagcacttacagcagtcaacaggctggtggctataatatatagagacctgctacgtagtaataagaaaaaaacaaaacactcttttaggaaataaaatggacaaagacacttcaaaaaaaaattcacccagcatgtaagtatatggtaaagtacctacccagccttactaatgattgagaaatggagtattacaagtgatacagaagtttaaatttctataatatcaagtgttaatcagtgatgtggagaaatgtgtacatgcatagtctgttgatgggaacacacattttgcagtctttttttttgtaggcaattagggagattctatcaaaatgtaaacatagtatgccaaacctatttctagaagtttattagtaatactccccaatgtacaaggatatttgcccaagtattttcattgtatcctactaactttacatatctctagtgagtaaataccagactcctggtcatgagactaacacatggmttgttttaaaagctttagtatgtctgagatattggaaaaagacaaaagtagaaaaggtactgttccttttctgttgaagtaactaccccatcagcaaccaactatagaaagaatgaaatgagttccaaacttagggactcaatacatgagtgtgtgactagagtatcaagtgcagttttggttgggcactttaatcaagtagaatggtctagatttgccagctgattgggacattcaagagtctagagttgaagacaccttaatatccttagcctggataactgggctgttagtcaccatcagctgagataggtggttatgtagagggaatgagaatttaggggccatgttaagaagtttgttttcaatactcaagggcttctgtgatccaacccaaatctatatttataacgccatctcctactatttttcttctggaactcaatgagccatgtatatgaaattgtctcttcgccaagagccttctgagccatcacacaccctgcttttgcttagattcattctgcctgtgccatcccatcgctctcctcctatagcagctctgcctatctttcagtattttattcaagtactttacttttccttgaaatatcctaggtcctttcctcccctaaaatcagatttaattattcattcctttgttttctcagaataattgcttaaacctcaattagaggatggtgttttatgctggctggaattaccatcaactcacagtctagaagattttgattcccctcttctataacatgcaagtcaaagattgcatgttattctatcttggtttcccatgaatctctcagtttagaatttgaggctttaagtagagaaagggaagacaattttggaagatttcaggcacttacctgcaaatcagaaatcatccaatagaagcaacagtttactccatctcacccaaatctaaccctcacacatgatgttgagatctcagtttgcttttgacatggcacctcccataaaattacttacatccaacactgctgcagcaacgttttttacagagscttcattacagtttcctggaccttcagccagggacagagtacaagtacagaagcttccagacttccttcttgtagtttgctgctgtactgaagtacttaacaggcacttaataagcatgtattgaatgaacaagtggaaaagtaaagctgaaaccatatggacatttgagtttgagcatgggagtatattttggtgccctttagagcagctgctgaggttggtgaatgtctaccatcagctctgtggcaggcagtggggttgtagagttagagtgcccctgctgccgagaagcttttctcattctgatattcagactccagggctctgtggatgggtctgagatggggaaacccatcacctttgtgacatttggtggacatatacatgcccaacatatttgtttgttaggsgtgagggagaggatctgtaatttttaggagtgcatgaattagtgtatacatgtgttttttagaagtaggaaagagaaggtgtctaatttttaccaaattgtcaaagggctatgactggaagccagctaagaaccccagtgttattttgcagccacaaggctttcagcaagtccaagcccatcagccctgctggaacaacaagtcccttagtaaagcgtttgcttgatagtctctgtgggtggagcaaagatcccacttgtcttgagtgtttacatgagcggatgcacacacccgctctccccaggagtagttttaggaaaatagatactgagtgccaaatatttactgatcacagtgggatcaggaaaagaataagacatcagtcactcctcagaaagaagatacaattacatgaaatgttccaattcctctggtatatttaaatcatgatttaagatcaaagaagagatttcacagtactccaagattcattgcccagtgaattgtatgaatagtcacaacacaggcattcagtggatctagtgattgttaggccaggtttaggaaggctttacaggtacacagaatgagaactctggattgggacatggatgggtactttttttgtcccagtctcatctttggaaaccaaccctccctccctccctccttttctccctccttctctccctccctccctctcaccctccctccctctctccccttctctctctgcttttttttcatttggtttctgtgacagctttctctcctttggctctcttcttgcatttctggctcttctgttggcttctcctcctctatcctgtattaaatacctacattcattagggagtggtaccaggctcccttcttttttttctaaacttccttccctagtgaccccctccattccagaattgaatatcatctcaatgttcatcacccccagtcttcacttccagcccagtcctttcaaatcacagcttcatgtcatacatgtgtgtccacctgactgccgtgggcatttccaacttagtatgtccacctgtgtctgtaaatttctcctcatatgttccattcttttcgatacatgggaccgtcttctgatcaagcccaaaatggaacctatcctttattccatcctcttttttttatatccagtccttcactgagttctgtccattttatctctaaaagatgccaattcttttcatctcttgctgtctgtaccagccccaccttattccaagcccctgtattttctcccttgtgctatagctctaggccctggactctgctgtacttcctagtgccctccctactacttcaattgccccaccaatcaaatcaaccttccacctgcagtcagggtgaactctttataagggaaattagatcattttattttcatgcttaaaaacgttcaagggcttcctgttgtatgtatccaaactttttatcttggggtgcaaagcactgtacagtatggtcctacccacttctcaagcccccaaggaaccacaccgacctcctttctgttcatatactgtgcccactcactcccgcttcactgccttagttcctactgttcttccccaaactctcagcatgattaactccttgggaaagttcaaatctcttcagcttaactgacatctcagtgggcccttccccagccactctaagtggctgtgtaataacctctctcccctgacagttctccttattttagcaccctattcgtttcttccatggaacttggtgttttgaaagtattcatttacttactgtatgcctccccagctccatcccaccctgtccagattctcagttatctgaaacagggcgtgtatttacctgctggccatggtgcttgcagagtgtcagtgttcaatcaatgtttgaataaagtaaatgaatctgaataggtagaaaacatggaaacagagctaactgtctcatgttccaggcaggtgaaagcttacgagcaaaagcagtgtcagaaaagccccattagtgtttgtagggcagttagtctttatcctctgaccagaacagaarggaatataatggtgtagtatcacagattcagaagtaagtttggagaaggtgagagcaaaactaaggagtttgggctttctctcgtatgcatttatgtttcattaaggtttctagacaggcaataaaatgaatgagaacactaagctagccacggtgggcagcgtcagtcctcattttaattatactttgtcatagttgttggatcacttctccccttcccctaccagactgatacctccttcggggaaggtacgattcctaaagcaccatgcaagaccccagctccgaacacagtgcttggcacatgagaggggctcaatgaatatgtttcaaatgtgtgggtgaattagtgagtaaacattggaagcaattatgcattcataatagaggtttagatccgtctcctccaaactgccttgttccctggaggtatccgaatggaggaccaagtaatcayacagcggttacatcgctgacgtccttcgctcagccactagggggtagattggctttgtctcttcttgacttccttaaccttgcagaggaagtctgttagaggattaacaatagatactctgcatgactccaatagtgtcatgcagtgcagtgattaatatatatagcaaacagttttcttgctaaagcttagttgattcaatctaaatattctttcagagaggtcttcctaattgtaatgacatggtataaatataagaagaaagaatgtcaattatcacttcgtataataacagtgttagtgttcatgcacataaattacaagtaagtttacctatttaaaagcaagaaaagtgctcagttttgcaatttaaaactttcgaatatgccacattttaaaattatgtcattacaaccagtagaagttagtaatcaccactaaagtgcatgttcttgaatagttgatgaactactcatagtgaaattctttaaaatatcatttgaaagggtaggatttaaaggcacctatgttatatttattttcaaacacttcagactcatccaacatgctttgaatatctgttatgtagctagtatcatgaaaacttctagaactgcactgtctcatatggcagctactaatcacacatggcaatttaaattcaaattttcagttcctcagtctcactaaccacatttcaaatgctcagtarccagatgtggctagtggctacatttccatcatttcagaaagttctattggaagacattgctctaaagaaaagaaattaatatgacccataatgatcactctatttgtagcatcaggaatgactggaatctgtctaggattccagtcattggagcagatgtcctcacccacattgatgaaaacacttcagtgccctcgttcccaataggtaatgatcctaagtcaaattatggccactagattaaagatgaggccttatccttgtcagtatcttatctgtttgagctagttgtatattttcttattttgttctaaacccattgtaatgtagttttacaaaatgacattttgaaagcaaacaacttcaaagtattagcttaaccccgaactcatcctgtatattctaatctactggcttaagttcccctgtctataaaagtaataactcagcagctttggcggagttccttcatcccttcagtggattcaggatttcaagagtctgagtaggagcttatcataaagtgtctgacagtgcatacatcrgaagggtttattggataaagatgcaatctgagtccatctgctccagatattttatcactttctcattcttttgcagatcacctacaaagcagtcagttcctttgacccagaaatagatttatccaatcagagtggaagagtttcaaagctgggaaatgaaacccattttctgttttttggactgtatccggggaccacatactcctttaccatccgagctagcacagctaagggttttgggcctccagcaacaaaccagttcaccaccaaaatatcaggtactctacattcgtgagttgtgtcttttatcagaagtaacatttttgtccgttttcattcccattgtcaagtatgccaagctcgcccacactaacattgtatccaaaggaatactcctggatgcctgaagctcagactcacagctttaaatgaagtactacaaatatttctcatttgggagcttaagatcctcacatgttaggaagtggctattgttttagcagggcgtcttggaggacttgggcatgaggcagaaggttctgttgagacactctcatccccttgtcaatcccaagttgccagagcagtactgttggaaaaatctctgtaatgaaccatgaaccatcgggagctctgcagaaagacagtcatatagagtctgcttcctgaaggatcagcctccttgggatctctaccataagaaacttctgtcctgaagagagaggcaaatacatgagggtaccaggaactgagggcctccagctttttgcttttagagacttaattatgccatctaacaaaagacgtaatttgagaaatatttctaggcatgttcaactgtgcagaaaatgtctttgtacttcagactagaggaaattaagctgccatctggtatgggatatacaacagcaataaaaaaattgcatgaatattttttcccattttttcccctttgggtatgagtgtggaagtgttgagttttggctttaactattttgtttggggtggagcaggtggggtggaagtagggaaaggagctaactcttgttatcagccatggttaggtcaataatatttagcctgacctttatatcttttatctctcattccttgttttgtattaataaaagttatcatttggagttgaaggaaaggaatattcacaactagagtattgtaagtgtttggctaggttttgagggagggtttagaattttctttttaagcaattataacaagggataattttttattrtgtaatattttatgagcacaaacttgacttgaaatttaatacacttgatattctgtgtatagaattaggttatagaaacagtatggagagttgagaaagagaaaataagtctttgggaagttagaataattagagattagaaaactgacacagattgaagaaaatgggttggtagaagaaagaccactggacttggaatcaaaaaatctaggttctagttatgattttgccaggcacttcctctctgattttgatcaaataaatttactcctacatacaaattaagataatattatctagcgcatgaatttatcatggggatttaaagatgaaataagtgccaatatatatacctcgaagcatgttttaagaaatttttcccatgtaagttacactacaaagattattgtcataatgagtgtattttttgaataaaataattcatttttgctatttttattagataagaattctgatcaacatggccgtattagtccgttctcacactgctaataaagacatacccgagactgggtaacttataaagaaaagaggtttaatttactcacagttcagcatggctgaggagacctcaggaaacacaatcatggtagattctaatcaatggttttgaccactttcagcatgccaagttcaaataattttattgaaaatcaagcaacctgacattttcattagcctatatggctcatcaagaataagtwtttgatttttatagtcttaaaacagttacagtttacaggtcctgttttcaattttcatggacctaagagagggaaccactcttgttaattctatgttatgaattggagttaatttttaagagaattgaaataaattttaatgctgagatcattcaataaatggaactcagaagtaacccatatctgttataaacaaatctttttgtatatgtaagacaattttaaaaactgtatttgcaagaaaacgacctctagctttctcatcaggagtctctaccagtgggctgtgaaaatatggtatgccctcccacatcacagctccgtgtaatgatttgtcttgtccgtaattactgaagacctctgttgctatcataataagacttaacagtctagagaaggaagatgctggaaactggccttagaaataggatttacattgggaggagaactaacatttgtagaattatatttgcctgtctctctgttctctctttgaattacgataataaacgtagagggtagttccccccattttgagatgtatagaagctcttatgctaattaaaacaaaacacagcaaaaagtcaaacccaagcctttcttatttcagttcctatgtgttttccactgtcatgcttttctgagagcccacagattgtcactaattaattccaacaaatctctctgactcccactgtcctctttaaatccccaatgagtctctggtacatgaaaaaccttgatttagatggaataactataaagtccaatgattatttcctaaatatgcctttagcataaacagtttatttgagaattcatatgtacagaaaagtgtaccaattgtaagtgtacagctcggtgatttttcacaagctatgctcatttagccagaatccaaatcaagaaacagaatattactcacaccttagaagccccctcataccatctcccaacttcaactcaagatcacagaggacagtatgggctgcttttagcagctgtccctgtgattctakgtagggartatatgtgaagcttgctcgtggttgttgatagctgcaatgtaaagtaaatkcactgtgttcttaatgctctttgtaaaagaaagtggaaactaaactgagaagataaaccagaaataatgagtctcccattctacgcctttttccccagcaccctctatgccagcttatgaacttgagacacctttgaatcaaactgacaataccgtgacagtcatgctgaaacctgcccacagcagaggagcacctgtcaggtatggaacagagggttgggccggctctagatagaagaaaactaaatcaagttgattaattcctccaatgtgttttctagggatttgctgcaaatctcagccagcatgtaaatccatatstttattagctctaattaaaagtaatgactgaggaaaatgaaagggctttgatgtaagrtgatcaagtattgtttaaagggttttattctgatgcaagtgagttgttcttttgaagataaggaacaaagcactagtctgttgaggaggtagttttaaattaaaaggtgactgcttgatgcaatttggttacccaagggcagatgacatttttgttctcagctctgttctttgaatggatgtttcgattttttcatttgtgtgtttactttgggttttatgtcatttattttttagtaaattggctaatttctcaataaaatatgagatgtatagttttttgaaaaaataacagattattggaaagaacattgtgaagtctttatctgaacagattagagttaattaccaacatctaggcccgcatcttattccatgatgatttatatagctaagcaattataaagtataacttgtatagtgactgaataaaataaattgattatttccacgacagagcaaaggatgcctgaatagctctggagtatcaacttgtcataaactcattaatctacataagtgaaatttctacttgattcagagggatttaaatgttttacctttgtattttggaatagtttcccttcagagtcatctattactttgaatagagtacttggaagaaagatttacattgacaattaaggcattatagggtttattttcatgtttcttttgtagaatttgatttcattaatgttttgacacctggctatatttgatcatgttttcactgcagtatcataaggcaatcagttagatttctttctattcagtaaaatatatatggaggtttcggttcataaagtcataagtaaaaccagaatagtattagtttttagtgaagtcagattagggaagagtcacagaaatttttatttgaaaaatctccaaaatgtttaaaacaatttttagtttatactgtagaataatgcaacacagtagctcatatgaggtttcatgcttgctgttcatagatgcagtttgtgagaatactatgaaatatataaaatctctattccaaattggagatagtgttactgctacctttcgagtgatgtgcttgacactccccaggccctctgggttgattcctgtgggtggcactgagaggttgcactaatccaatggacccaaggcacgcattagatgctatccaagactcaagtgtacccatgaccatggctcagtcttttttgactttaaaagctgaaatttattaaatgaaaatgtatgctctgaccatggccttgggagtgtcatttgtttctgacccacttaacagttgctcagactcagcaataaagggtcattgggacaggactcaatattttactgcaaagcatcatgatcatgtgamtagttagagttcactcagattcaatgcctccaaactgaaggaagctgaaagcttaatcatttttcaaaaacagccagttatcccatggtactttgttcttatatggataccttttgcacattttctatacktgtatcttactttcaaaccctttcagttggattttcattcgcatctttgtatagatctttccaagaccaagttttgttggtttgtttgtttttgagatggagtctcactctggtcgcccaggctggaatgcagtggccttatctcagctcactgcagcctctgcctcccaggttcaagcgatttcttctatctcagcctcccaagtagctgggattacagacgtgctactgcacccagctaatttttgtatttttagtagagacagggtttcatcatgttgaccaggctcgtcttgaactcctgacctcaggtgatctgcccatcttggcctcccaaagtgcagggattacaggtgtgagccaccatgcctggccaagactaaattttaaaataattgctctttgcgcaatatacctgcacccctttcccagtcctcttccctagtctttacaaggtgccaggcacactccaaactactgttcctatttctagcatatgcctcactaagacattattttgttgttgcttacttttacacatgtctagttgtttttcggagactttgggaccttactggtagttcttggtgtcctcaggcttcctattcttacatctataaaaatacagatccaaatgcttgtcagagtccaaaatacataactttcactgcagaccttacatcatttcatcactttgtattgcctcaccctcttttacagttgtcataacatcccggtttccaagttcaacactgctgtgcttttaggaagggtcatgtcagtattggtgaatatgctccttgaatttgccaggggcactttgcatccagtctctaataccttcttcccctgttagcatcttgaaattaataaatatatccatgttcattattcacatctgtaattttagaatcatgatcaatccttaaggggcatcattcagtaagcattatggggaaacctgctatagacatcatctttattggaaggatgcctatcttaaatgggtaaatcgtgttggcacaaatttgagagaggaaattatttcaacctcacctgtcgaaaagatttttttttttttttttgcaraaaagtgaatgttgtcttcaagggattcattatataggacaacataatkggactgattatctgtagaatagatggaagaccaatatagcgagaaagactaggtkggggaaaaaaatgtgtatagtaccctctaactaaatagggcatattaaaattctcaatttcatgtaatgtttagacaaataagaactctgattatggaatcgtatggacctaaatataaagccataatgtaaattaaaacatttgaacacatctggaaatctgcaaaatgcacatgtaatcaaactgcagtacaagaaagcttttcccaaatgataagataaatactagaaggaggagggaaatggaagcgaacatctgtttgctttcctggattttgcacagtattgtgtgttcaaaaatactgtcattgtgtgatttccaaaacccatttttttcaattgatttgatttttttttwaatccgtattcattgatgttgaaaattcagtcgaatttcgtttatgcacttcactaagtaaggtggtcatgtattgatttccctacaaacactcagcttggttcatgtagattcttgaaattgcactaaactctcaatgtaaatgattgttgtctttttattgatcaacacatcagctctgtcacataaaattatttaaatcctgagatggccaagaagaacacaattccatcattccagccagtaaactagcatgtaggagagaattttaatgtctgttcatggattcaaagttttttcattaataagatatggaaaagtgtaactttctttcatttatttatgtatttattctttttttgagacaggttctcactctattgcccaggctagagtatagtggtgcaattgtagctcactgcagtcttgaccttctgaggctgaagcgatccccctgcctcagcctccagagtaggtattagagacaggatgcacagtgcccctggcaaattcaaggagcatattcaccaatactgacatgacccttcctaaaagcacagcagtgttcaatttggaaagcagggcacctcaaatgtggaactgaagccagagagagattattattgctaatgaaagtctgtcccagcactttgggaggcaaaggtggaaggatcacttgaggccaggagtttgagaccaccctgggcaatgtagcaagaccctgtctctacaaaaaagaaaattaaaaaacaaaaacaaacaaacaaaaaacatagcggagcatgggtatgtgcctgcagtcccaacctaggcatggttgtgtgtgcctatactcaggaggctgaggctggaggattgcttgaacacaggagttcaagatcagcctggacaacatagagaggcccaacatagaccctctaccaaaaaaattttttttaagaaagacaggagataatcatgyatttttgttttaaaacgtttctcagaaattatggttgttggcatacaaatggttatggtttagtagttcaaggttatgaagcataaagcatgtttttttttttctcaagcagcagcaacccatttgtttatctcactgtccgtaagtccaaggaaagagatgttcagtccattaacactaccttcctagacatcctattctcttctccacgctaggagcctttgagcatgccaacctcatggggttcttgtgaagactaaatgaggtgatattatttaacacttcaaaccatgctttgcacatactcagcaccatgtaagtgtttactcttgccttagcagtagttctcattacacgtttctattcataagaccagccctggtcctccagcatttccttttttcgtctcattttattcaaatctgatatcatgaaaaatctaattttacatgaaaaatataattatttcctctatcaacagaatcataaatagaattcatataaattcagatttctctgatgaatcttaagtttgattgcaaggagctaccagtttatttgtgcatttgcaagttttcaggaattgatcttataaataattagcaaactcccctgaccccaaatctatataataactcagaaaaaaaaatggatgtgtttccctattgatccctgaatcattatgtgattgtggttattatcagcttaactgaataaacttagccataaaacaagcaaaacggtcttctgtttataaccactctaaaaggaaataaacacttggcaacatagtaaatttcacaatgtgccatgggtatgaagaaccagtgagatgtattacttacgtaacttaacaaagcctaatgttctagtcaccctttaagtatatgaatctctttccactttattaaaaaaagatatttgtgatttacatgccattttataataattcagtccttataattatgttagaattcactccccagattccagaatttgttcttttaatcagaataggtttgttcaagagtttgatcctggcttagaggagccagctaaattctattatttattcaaaaaagtttatccctttatagtattttcctgctggaatgacaatattattttgagaaacaaaaaacttatagtgtaaaaccttgcaatgcaaagtttaccttaagatataaatattctggccaggtgcagtggcccatgactgtaatcctaacacttcgggaggccaaggtgggaggattgtttgagctcaggaagtcaaggcagcagtgagctgtgattatgcactccaacttgggcagctgagccagaccctgtctcaaaaaaaaaaaagatataaatgttttgtaatataaattttaaagtggctttattttaacttagcctattataaatcaatataggggctagacacggtggttcaaacctgtaatcccagcactttgggaggccaaggttggaggattgcttgagcctgggagtgcaagaccagcctgggcaacaaattgagaccctatctcaattataattaaattttaaaaatttaaaacaaaatataaataaaataaatcaatatatggtttccagatctaaataatgcttactctaaattaattagaaactactgaatccattaataattaatacaactattgcccctaagatacaagatcatatcaagtgtcgcacatagccttttagacagaatttttcattcttcctttggcaaatgttaaggaggaracttctaatattcaaataatcactcactttatatatcacataaattatgggcctaatttttaaaacgagtgcatgacatagagaaggacacattttgaaattagataagcatagtttcaaatccaggctctctccacttgtagttacgccactgttaaaaattccatcttaaggtctctgagcctgggcttgcctgtctttccacagcaaggataataccccttatatcttacagctgtgctaggattggatttgttaaatactcatgaggttcaagcacaaggtggtgctaagcattggggatatggaggaggctgctaagggctctcttctccaggggctggcaatgtagattggaaagagagcaacatggaatctagtgtcctgtagtaagtagggatgaggatgggaaccagtggcctgaccagggagtggtcagtacagggaagagtcagctaagacttcagagaggaggtaaccctggggccaagtagctgaatcttgacagacggctgttgttcagagcatctgtgtgatgtggagtatgttgccagggaggttagatatgtggcaaggaataaaaaaatgagagagacaggttggctccatgaagacagggaggactgagtttggcctgatctgagaatgagaagtgtgttataatcagagagaggggtgggatgggagaagaagcaagggagatagaggatgaattggacaaccttgtactccataccaataagtagccattcaagggattcaggtcagggaaaaaatgtaaggaagagctgcagcagcaatggaggatgggttagagggcgtgcggcctcagaacaaactaataggagcggcataaaggctggaggatgtgctgggcccagttaagatagagctaaccctggcggcatggaggaagggggtttcataaatgccagatgctgattttcattagaaataggatttagagaaatcaaaaacacttagtcctttttagaaggaaaaaaagagaatatattgatgttaaaaatactgtctggggtattgttaaagtgaatactagaacgcttgaaattgaaaaactagcctagcaatgactttccaataattcattggaaatcactaattatataaatatttttaaaccccaattttcataagcagtaaaaagttgttcttagtgtctcttgtttggaagaaccttctggatctttcttttgttgcttctcctaccttccttatattgcaccttaacccctttrctgtgggcctgtgtccatcaattttgtgacaatgactgtacgtgttgaggtgtkaccatgatgcctactcagtggatgtgggtggcacctctggttactaaaagctagagtgtgaaatgcttctctcggcttcagaaggcatgccagcagcacacttagtgggtgattgtggctcattcttggctagggccggggaagacctaagttttttatcatactgctttgctatccccaaaagaacccatgcctgtccctgaaaaggcaaatatttgagttggaactacagactccatgaaagctctcgaatgtccttcacagtggaggccacaccttgcacattcgtggaggcgagagccaggttgtgttatgcgttcccctcttattgaccagctgcacagaagccattcggcaggaaggagggagacattaaagtctacttcattttccattgaccgtagagaaagttacatgctgtttcttttccctcatctagatagaccgtctttaaatgttaatagtggaataaattagaaatagtttcaattataaactcagagcactraaagattgcaaatgcctgcactgaacaatatattactttacgaattgtaaagctgctctgccatttgctctcgggaacccttgggtcttcttaatcacagttattgatttagggagtttaagggatgaacttctagaggtgttccaagctagggctgatagcctttcttggagaggatcttggacattttgagaaagattaactgatttgactatagatgcctcactttcacatatgtgaaatgtgaggaaaggttgcaaattccaagagactgataaagtcatgtgtgatcactaagccggtatgcttcttagagccctagacttttagaactgaggacgaccaactcagaagtcctgaccacattcctcatgttacatttctgcttcatcctattttggtggtggggagaggaatgagggcacagatacagaaggaattatgttttacatcattctcttcagcagggcattttatcaaccagcacttatamgtatactcaatgtaactatttattataagaamaccagtgtacacaaaagtgctaatatgccttctatttccttaataactattttttaagtatattatattatgcttgtgaggcttacctgtatttcattgcaacttaattaaattaatattcagctcttcaatcagacagtagaaagattagggagtggttttggtgttttttcccatataattatgtcccttttgacatgtatgtatggcccagttccatctcatctctacttctacctgctaagtgttttcctgtcctgtatcaatgtattttccactcaatgagaagtagtaagagctctgtccagttattagtacctggttaaaatcctggcccttcatagcattgaaaagtgttgtaggaaatgttaggattgacacttggctactgttcagttattcttcattcattcaccagatatctactgaacacttattgtcttcatgtcattgtgctagggttgtgataaaagctgtctagaaaagtacagggtactctaagagtatgtgacagaaggatgaaatctcaacaggagaatcaggagtgtcttactgagaatgtgttacttaaactgaaacctgaggaggaggtaggtagataggttcaccaagtaggagagcaatcagtagaaaagcctaagataagagaagttaaagagacctaaacagtggtcatcctagtcaacaaaattaaaaacacacaaggtttgaccatcactcaggagcattaattagatttacatgcagttgtgcagagcataaggacatttcattcaacagactgcgtatacagcagtggtcctgaaatattataatactgtcttttcattgcaccttttctacatttagctttaggtttacagatactccccactgttttacagttgcctacagtattcagtagagtcacataccatatagctctgtagcctagcagcaataggctctaccatacagcctaggggtgtagtaggctgtaccatctagggttttgtaagtgcaccstatgatgtttgcacaaagatggaatggcctaatgaggcacttctcagaatatatccccatcattaagtgactcatgaccatatttaatgttgagagtgagcatttccctaggctaaacattatgtaaaacatataaaaatatratcagaaatgcaaaatcatttgatcacaaaatgattttaataatttagtttttgaatatcatgcaatacctctaacctaattaagagtgcaataaatgtttattgaatgaacctcatctttttcttgccagcagtaataattatcacctgaaacatttattacagataagaagaccctagaccttcatttaactagtgggacataccaggaacaagtggagttttaaattatattttcatccctaaataaaagttaaatatcatgaaccttccatagaatgcagagctataaaagaacaccctgcctttacctttgaagcaatcttttttttttaataagaagagtaattgagaaagattgcttcaaataagccattgctataaattcagatccaatcaggaaggtcactccaatttgcaggcttatactgactcctgcaaaaacttgtcttctcacctcttgaggacagtgatgacaccccctcccctccttttcgctttaccttccatcccccacaatcactgtcttagttcatatttgtctttctcaggtctccaatccccattcaccctgtggctgcagggtctttcctcccagcttaataacccatcagtgtctccctattgccttcagcataaatccagacttcctctaatggggaagcctctggcttctactcacttcctggggcagcctcccttccacctgtaaatatttgcctgagaatatcctgggtggttccatgccattttgtgggtttattttgcagctgatgtttctttcatggaatcttctctcttttatcttccctctgtcctgcctgcacacacacacacagtctctccacagtctctttctctctctctctctctctttctctctctctttctctcacttatttccactcccctcctagctatggcccagatgtcacctccttggagagcccaccctggccccctgcccatctgtgtcctgcagctctcccagagagctcagccctagattcattcactgcactggctggtgaccgcttgtcctggccacctactagctccttcagggccaggcctgtcctctgattttacttctgtatttccaatcctggttctatgccagacacaggcttccatgagtatttgtttatttgttttgtttttattatttgtttctcatttttttaaactgtagaagaatttttactgaggcaaaaactatgactgggtttgcatattagatcaaccactggggccgggacattggggaagtaaacaggccaatgtgtcttccggatggaaaattaacagattaccgtggatggatgcatcaaaactgtcttttgccaaacacaaagattttgaatggagcaggctgtgctcaggggttccacctcccagttcccaccaaatgactgaagtttcatttggtagtataagtgacatctaatctctctgatgtaaacaattcatacaagttaatagtttagaaaggtagtatcacaaattaagagaacacgtggcacagacacaagaagacttgggtttgaatctcggctgggacatttactaattgtgtgacctgaagtcaccctgtgtgtgaggctcttcttgcattgctataaagatacccgagactcggtaatttataaagaaaagaggtttaattggctcagcattctgcaggctttacaggaagcatggtgttggcatctgcttggctgctggggaggcctcagaagcctccaatattccacttaagaccatggcggaagacaaagaggaagaaggcatgtcacatggtgaaagcaggagcaaggcagagagtgaggagggagatgccacacacttgtgtgtgtgtgtgtgtgtatgtgtggaaacggagtcttactctgtcacccaggctggagggcagtggcgtgatctcggctcactgcaacctctgcctccccggttcaagcagttcttcttctgcctcagcctcctgagtatctgggattataggcgcctaccaccatgcctggctaattttgtatttttagtagagacggggttttgctatgttggccaagctggttgygaactcctgacctcaagtgatctacccaccttggcgtcccaaagtgctgagattacaggtgtgagccgccactcccagccagatgccacacgtttttaagagaccaaatctcgtgcaaactcagagtgagatatcacttatccccaaggagatggcccaagccactcatgaaggatctgctcccatgaccaaacatctctcacctggccccacctccagttcccaattgggaattacattcagtatgagatttgggcagggacaaatatccaaactatggcaccctgtaaattctctaagtctgttccttcatttgtaaaattcgcatcaagtatactacttgcctgtctcacagcctggtcagaaggattatgatcagtgaaaattatttgcaaaccgaattgctcaaagagaataaagctatgatatcatgatttgcttaaaaaatgttgactagattgctattcagtctttatgcccattatactccgcttttagtaatacacttaaaatttcctatcattactgccttttatcttctatgctgatattctgtggttatcacctatataggaactatgttttaacagtcactgatatttgacaatacttctatagaagttgtaagaaatatgtgtgtttggtattaatattgtgcattcatttggtaaaatcatcaatgttttagatctcttgttccatcaaaacatcccagcaataagagaaggcattgttggtaggactgtttatagataacagctcattccagggagtaaaagtgcaatgttgttaagaagcataaagaatgcaaccatagcatggagcttgatgcttctgggtttaaattcttatttgccaagatttatgtccacctcaaaggtaataataatatctacctcaaaggacagctgggagaattagtgacctgtaagcaaagcagtcaggacagcatcaaacacagatgttatctgttcagtacaggaagccttttcttattgttgatttctatagtgatagaaacaacttatagataacatggtagccccttttattctgcctatgtcttgggaaattttctgggtcctagcattgtattcctgagcctcagttatgttcttcttagcagcttgtgatagataaataataattacagcaatagaaaatgaataatcatggttacttggattgaggagctgtgatgtgccaagcccatgcttggtcccaaatgaaataatttatcatgattcagagcaggcttcctcgctagatgccagcatttccccattacagttgaaagcactgaggttcagggaggttaacagacttgtctactctaaccccaaagccatgagctttccgtgtaacacttaatcttgtgctcagagccacagggcacgtgagctgtcaggaccttgcctcctcctgggagctgtgctcattctcttgtcccccactktgcttgatcagaagacatctttcctcctgacccttcagaaccaagatggttacacctccctttgcagacgtggactattctgcaaattaatatcctttatttattgtcttttctagtacaggcatatcttggagttattgcaggctcagttccagatcactgcaataaagtgaatatcacaataaagcaagtcacacacattttttgtttcctagtgcatagaaaagttatgtttatattatactgtagtctgttaagtgagcaatagcattatgtcttaaaaaatgtatctaccttaattaaaaaatacattattgctaaaagtactgatgatcatctgagccttcaatgaggcataatctttttgctagtggagggtctttcctcaatatggatggttgctgactaatcagggtggtagtttctgaaggtttgggtgactgtggcaatttcctaaaataagacaatgaaatttgccacatcagttgactttgcttttcgcaaaagatttctctatagcatgggatgctgttggatagcattttacccatagtagaacttctttcaaaattggagtcaatcctctcaaaccttgtcagtgcgttatcaactatgttaatataatattctaaatcatttgttgtcatttcaacagtggtcacagcatcttcatcacaagtagatttcatctcaagaaaccactttctttgcttacccataggaagcaactgctcatccgttcaagtgtgatcatgagattgcagcaattcagtcatgtcctcaggctccacttctaattctagttgttctttccaccacatctgaggtgacttcttccattgaagtgttgaacccctcaaagtcacccttgaggtttagaaacaacttcttccaagctcctgttaatattaatactttcacttcctcccatgaatcacaaatgttcttaatggcatctggaatagtgacccctttccattgactttgaccagacccattagaggaataattatatatggcagctatagcatcacaaaatctattccgtgtataataagacatgaaagttaaaatgactccttgacccatgggctgcaaaatggatgtcatgttagaagatatgaaaacagcattcatcccatgtacgtctccatcagagctcatgggtgatcaagtgcattgtcaaatgagcagtaatatttagaaaggaatcctttttttctgagaagtaggtctcaacagtgggcttaaaatattcagtaaaccatactgtaaatagatgtggtatcatccaggctttgttgttccatttgtagagcacaggcagagtaggtttagcatgattcttaagggccctaggatggtaaatgagcattggctttaacttaaacttgctagcagcatgagcccgtaacacaagagtcagcctgtcctttgacaccagacattgacttctcctcttcagctatgaaagtcctagatggcatctgcttccaatagaaggccatttcatctacattgaaaatctgtggtttagtgttgtcaccctcatcaatgactttagctagatcttctggataatgtgctacagcttctacatcagcacttgctgcttcgctttgtacttttatgttatgaagatggctacttttcttaaacctcatgaaccaacctctgctagcttcagacttttcttctgcagcttcctcacctccctcagccttcatagaattgaagaaagttagggtcttgctctgcactaggcttggtttaagggaatatcatggctggtttgatcttctatccagaccactcaagttagtttaatattctatccagaccactaacactttctccatatcagcaataaagccgtttcactttcctatcattcatgtgttcactggagtagcacttttaatttccttcaataacttttcctttgcatttacaacttggctgtttggtataagaggcctagctttcgaactgtcttggcttttgacatgccttcctcactgtgcttaataatttccggcttttaatttaaggtgagaggcttgcaactcttcctttcacttgaatacttaaaggccattgtatggttatcatttgttctaatttcaatattgtgtgtcttagggagtagggaggcccagtgccagggagagagatggctgtcttatatggacacagttcatagcaccccaaaacaattacaagagtaacatcaaagatcactcatcacagatcaccataacggttgtaataataatgaaaaagtttgaaatgttgcaggaattaccaaaatggcacagagacatgaagtaagtgcatgctgtaagataaatggcactgacagacttgctgaagggagggttgccacaaaccttcaatttgtaaaactttagttcagtatctgtgaagcccaataatgtgaagtgccttattaagctgggtacgcctttattaagaaaatacgttacacctttgtttctatattatgatcattggaatctctggggtttatccctactgcttgcttaattcttaaatgcaatacttttgtattcttcattatttccttgttattatttttaagctgaaacattttggggttttgtttgttcgttttgttatgttttagtgggggaatcttgctccattgtccaggctggagtgcagtagcatgatcatagctcactgcagcctcaaattccttggctcaagcgatcctcccacctcagtctcctgagtagctgggacttagaggtggtgtgccaccacacgcagctgatttttttttattttctatagagcagggtctcactatcttgcacaagttggtctcaaactcctgggcccaagcagtcctcccaccttggcttcccaaagtgctagaactacaggcatgaggtaccacacccagcccttgttaattgtttagccatataattttgagaacttgaagaacttaaacgaaattgttttagaatattggattattttaatcaaattaatcagtgtttttctgctggtatgtatgttctttttcctttcaccatttttattagtctccaaagaatcaataaattaaggatcagtgcttttgaggtacttataagtggctttttaattgttccctttttatttattggagaaatgcagactgcaggagcatcttaaaccttcagggctaaatgcacttttgtcacagttttcaaaccttttgaaaaggctctatctgtggctaaaattgtttagggaaagcaactgacttctaataattttcctttattcattgaggtacacataggatcaaaatgtcattgagtggtaaaacttcagcctgctttttatagaatttgtttttattattacttactgttgctgaatcgctacagtgagtgttagcaaaaggtgccagatcccttactatcaccaccaccactacccccaccccacctgcttttaagtgagttttattgtattaaaaaataatactctggattcctttactgccagaaaacaaagatcatttttattaatgttgcttctaggatgacaatgtcagtcatctctttgaaaattcattttggaaactaagtttgttctttaagaacctttgaaaagaagctttaaaaatggcagaggaagataataataatagagtagatgtatttgagcttttatacaatgaaacttaatttaactttccctcaaactccatttcagacttgcttttgtgcatgaaaatatgctgcctagccttccctcccctacttttcacattttcttttcttcaaagtaatctcttctgaaggattctctgcatgggatcagacctccattctcattcccaggcccccagtgctgagggcggcaagcccagggcgcctgtgggagggtgtacagggaggctgctatagacagggaaggtcaggaatggctctcagagccaaattccactgccagtcaccccccagaaaaaccaacaaaatacttacktaatattttgatataactttaaggattaaaatggatatccagtgaagtactgaaaacaaaaaattatggcctttgtagcctaaggagtgattatagactcgacagagagtagttccaagtttgcctgacagtgatttggaaagagagaggagaacaaagacgaagaccatgcatgccttcaagcttctttcccggcccaccctcaggtacctccttcttcatccttacctcaggccttgtgggcgcctagaggagtcaagactaggaagcctggttttcatgctctgcaggacaggaattgaatgaggaagaccctgccattcttgtgtagctcttggggccactctggggactcctgggggcatacctgctgggacctgggcagtatgtgaggtaggacccagctcattgtcttccatcttctgtgctgatgaagggtactcacaagcaattggagtgaatggagactgtattgggatctgttaataaacatgttggcttttttttttgttgctgttgtgttatctttaattcagggagaatgttggtgactgtagcattgcaggagcagttttagggtgagaacatttgggcacttggttcaggtcagatgccctcaatgtagtagatgctagaagagattttaacgtagagattgacacatccctgggtcctgttactttgtcctttgtacaaacccttatcagatccttggcatggtagttcttcattggtgtgatgtatttctgacactcttagcctgtgcttttcaaggacggggcagtctgtgcctaattcctctttttattcttcccctgtgcctggaacaaggcctgatacgtggtgaatattgtggaaagaaaggatggaggaaacatgaatgaaataattttcttctcatttgctgatgtcacaacttgcctgatcttgtgctgagagtcataaaatattagcgcctgaagggctttagtggtcagttggtgattcaggagcaaagcaggagccagtcacctgtggacggtgattcccaagtcaatgctctctcatcagcacccccttgggcacagctgcctttctctgatagttgcatttgtattccagcycatctggcccaaagcactggaacttttcgggactgaaagattttgaattggataaaatacaaactataaaatatcattcagacaaacatacaggaacaaagctatttggtgtggctttgatagtattctctttctatttttattcaaatcattaggactatttaagagaacatacttttcataatagtaactaattttggattatactttcataatcatgtgtttatgaaattgagatgattaaattgtgttaaatttatatgaaataggaaatgcaaaggaaattgtcttcacttgttaaaagcaggagacatcacccttaaagatgttccatctaggactaatttactcgaaatgtggtgcctgttgtgaagattaatgataggtggccttttacagagcttctcagcctgagcctaatgttctagttgttctttttattatcccaaacctccataactaaagaatttttttcaccctgccctttgttcataatatgggatggtaattgagttcatatttctcacccaacctttcatctgtaattaatattttattatatcagattttatcactaactagcagagcagcagggtattgaaccgagtatgggagcatgtgcacagacacacacccacagagcaatagtaacttactgatgccaggcaagctccttgttatgagttacggctgagagaacataaaaaatgcttgtggtgccccacaaatattccacagcaatttctggccagtcttgtctatatcagagcaggacaaagagaaattaaagttgctaatatagaatattcagccccacaggtctatttatcctgtgtgatgtgttacccattgccaattgtctgtataaaactaattaccatttatcattgataatttaatcaacaggtgtgtgtccagtcagttactctcagtgttacctgaaggactctaaggaatctgagcagtaataacaaacactgaattctgatttttttccagtaattgtaatttggtgacatattttttaaaactgagtttagttttatcaggttgtttagagtattagggtgtcatttcagtaaatgctgacagatttaggaaaagacaatgtcagagcaaagaacaagaggtaaataaattcagtgtggctgcatggcattaacccttagttacacatttatttttcatgctttgcatgtaattaatattttcattttctttcatctccccccatattaatcttcaggaagctatcaatactaatatctattctttttatacatatataatggatggtttttaccaaaaattacaaatcaagccaaaagtcactactagatatgataaaatgaacaatattctaagtccctgaaatgatcagaagtgcctgttttagaggattagcaaaaacaacaatgaaagcgttacaacttttctccttctctgttctcttccttacctccctaccttctattatccaattggtaaccctctgatatcttatggtgaaaagaaatacgataaatggataacaaaaatggatttacaactcatcttgaaatgaattaggacaaaacattttaagttaatttcacatatgtatgaggcttcctctccaggaactcgaaagttaggaaaaaactaaaaacattttatcacatttgaactttcaagtctaaaaaagtagatgaaagatgttcagatgttcttttctagattatacttcatgtgctattccatataaatgcagatttttcattctccttgtaaaggccttagaattttgttgtagaaatgcctagcataaattaaactttaaattaaatttccttccataggaaagttctgatataatgatgtcacagtgttggcagattcatcctcactgtggattgtgcttttaatatcgcacatgcagtaggaagatttgatgttactttaaattccagaataatggtaggacagggctagggtggtgcaactttaataaacaaaggcagcatgggcaactcattaaaaggataatagaatttaaattcagctcactaagctagaaatttctgatcagttttctattctcagaaatttgctttttaaaactctttctagaaacaccattccaacagtgagattttcaaagctagttttgagattatgattgtggatggaaaaattttatgaaactcattagtgaagtgatgttacttgtacagatgaaaaacacatcagctataaagttctgtcaaggtactattgacctaggtgctaataatgtgttaatttccatcagggaaacagcaaattatggcaattgggcagcagataggatttagctatttttcattagcacttgggctttgataaaggggactagaaaagagctgcttgacctttcagtgcttaaattattaaagagcaaatagatttgaggtctggatgcttgaaaatctaatttgtcttgtggagcaaggatgaaaagacattttgggtttgaaattgctccagtcaacttagttctttctttaatatatctgaagatgagtggatagtagccatttaaaaagcagtatgtctggagtagagtgtataatagaacccatgccaactggctaacatggaggcctgtccaatgattgtttaattcttaaattttcacctaatcctcattaaactactgcttgaaacaaatgatttttttcatgtttgcttagatgatatttatattacaaaacaaaattttgtatcattagagaatgtcaaacattgtgttgtttaaggcaaactagagcagtgcctgacacctattaggcactcaaaaaaatttgttgaaataataaatcagtgtacacactcacccatcacacctacgagccaggttaggagagaggaatgggaagtgagagatggaggtgtggggggcacatagagacacagcgtttgattcccttaggttcattatttaattgtgggttatccaggataaactaaaacataactagcatcctcttaccataaaaccttttccttggtcattgctttctctttggctcttgagtatttgggtaatgaatacaaaataaacttcacattaaattttaataaggcaaagcatcgttgtgactatcggtgtgcttcctccctcctggtacatagaatgtgtaatatacccccaaaccaaatagaagcaacttcaggattatagcatgctttcagaaatatgtacttcacagccgaagtgtcacgagacacaacagtgactaaacctttgcccttcttcttcagaagcttgtaggacttttgaaaatagtgataaaaggacacaaaatgactatgtgctcacagaaaacatgtttttgtgcatttggagcagagcaagagaacatgaaaatgagggaacagactataagcccttgagagagactcattgagggtctgtgttttaggacacagggcatctgagagtgacctagagttcattgccttgaggagaactacatttaagtggcaaacttgagtccaggccagggtgaaggaaaagaggcaaagatgtttgcagtaggagaatctaggatcttgggacatggaaagtctaggagcagctgtgctgcttttttgtctagctgggttgtaacaggagggagctccttgcaggttgagagaggtgggaagatcacagtgctccgaggacaccagcccggtgctaaagtcactgtggagcccaggagaacgtcctccctgaaagtaattaatgattcagatatagaattgaggaatgattctgtacataccttgattcctcattccagtgaatgattcctcaatcattcattgaggaatgattcagatacagaaggaattgaggtcaaagccaacattatcrtctataactcccttgatgtgataagtgtgaatctttacaatactcaaaagaagttgactgtggaaagtcagtggagactagcttatgtgttggttgtgtctacaggagcaagtgaaaattcccttcaggccagatggtttccatcagtgccttcactggacctgtgaatgaggaatgccagcacagcctggtctgatgattaggagaactggctctgctgtcagaccacctctgccacttctgtagaataccctggtagaatggcacttcacctctacacctcagttttcacattaggaaaatgggaaagataaactctgtgtgtgttgggcacctggcctagcacttccagtatggaatatctgcaacatttttttcttcacacatatccttattttcctgctttgtctagtatatggatttcccagaagttgtttttaagttgaagttttgaaaatcatgtcatacaggaaatgaactggaaaaacgatttgaaggaagtgatgttaaaaattattatattggccaggcgcagtggctcatgcctgtaatcccagaactttgggaggccgaggcgggcggatcacgatgtcaggagattgagatcctggctaacacggtgaaaccccgtctctactaaaaatacaaaaacaaaattagccgggtgtggtggcgggcgcctgtagttccagctacttgggaggctggggtgggagaatggcgtgaacccaggaggcagagcttgcagtgagccaagatcgtgccactgcactccagcctgggtgacagagggagactccatctcaaaaaaaaaaattattttattaaatggagaatcactttgcaaagaaaataattattcttacggtttctctattttgtgagatcagtccttgtaagttgaataaaaattctagatatatgaactccatgttagagattcacttaattctctcatttcgtaggagaaaaataaaactcaaataaattaattgaaatgcatttaaaacccaagcttttagcagaattagaattagagctcagaccagtgcattgtctttacccctccaaaagcgatttcargagaatggtcacgcttccttaggcctgtttgtttttaatggtattccaggtgagacttctttcaccgctgtcaactgtggctgtgctacagaacaggtagtatttagtcttccactttgaccttgaccctttacctttactactgtatgaatgatccactaatgtggagcattttacgtgactcaatccgatagaaagtatctgctgtttaggaaataagagttgtactcctttttttaagtttacatcactggtaatattcactttatcattgccttataaacctgctggttacctgtctacagagaaatcagtctgatattctaaaacaattgatttttatttagacagaattaccaacgaaatggcagcacacattttgtttctgtaatagaaggtgctaagtggttgtgcccacagagataggtggttctatgagtgcagattcagaggtcacatagacgagagtgtagagacaaacctttctaggcattccccccatgggtggggatagcaggcagccctcttctgtgctttttccttggcattaatgggttcttgtactgggcagctcttggttcctgggaattctggtgcctttctgatactgtaagaaaaagatccctcttcctgccagaggacttaaaatctaatctggactcagttcagggaagctgttgtcaggctttagtttttctcagcatgagaaaggtttttttccaacaaaactgcaaacaacattcatcactctggcaaatgtattaaataaataccttaattttctaaaaatctatcagttcaaggtttctgccattctcctgaggttacttcagaattcaaagacattggaagaggatgagcgggtaccagagacctactccttagtggggctgtcatccttgcaggcgtcttcagagatacccagcccattcttatatgagattcgaggggccttgttcattagttagtcttactaatcacttggaactccaaggctttggcttttgaaactataatcccttatctctgcttttcttatgcatttctttccactgactgaatacggtgagtgcaaaggaacataagaaaacataggaagataaaccttagttaacatgaatcactacacattgtgttttgtgatttgttaaaactttacttgtgttgtcattaaagaaaataatgcattgctttttaaaataaacttacagttggtataatttaattgtatttatcaggtaaactgagttaattatctgtaaaatcatcgtcagttacatgtgagaaaaacattacttctgctcacataaacagtagagattatcatattaaaaatttaaaatgatggtgaattttgtttctctcactaaatagtgttgttttgggtgagagagttctgaagaagaactgaagaaccctccctgtctttcactgagcaagtgctgcatgagagtctgttatatatcaagcacttagtatggactgcgtccagtgtgttctttattttgcgtgtcctgtgggtccatgcagttgaaggcagagtggatcagttcagttatcataaaatatcattgatggtactcttgtttttctagtgtctatcaaatagttgttgaggaagaacgtcctcgaagaactaaaaagacgacagaaatcttaaagtgctacccagtgccaattcacttccagaatgcttctctgctgaactcacagtactaytttgctgcagaatttcctgcagacagcctccaagctgcgcagccttttacaattggtgataataagacatataatggatactggaacactccccttctcccctataaaagctacagaatttatttccaagctgctagtagagccaatggggtaagttgtacagataactgtttacttaggctatttggggttgttaatgtgaacatagattaagtaaaatagtagtaaaatggaagtcatgcttttctgcatttctacttgtaaacaaatgtgattttcttctcttaaaattatttttgtctagagaaatttatggaaagaaacaaatatactcatctttttttttttttgatkgggggagtttatcatcaacatgataggttttattttcagttttcctgttaccaaaagttggctggcaattctgcttagcttactattttacaggaagacagtatagctccaacacatacattcagctcatttaaaattttgtgagattcacagcatctgtcttttcagcatagtctgtcccattaaagaaatgggaactgaagaagttccacaagagtttctacttcctatactttgactaaatttggtatcttttttttttcctaagagaaaatagaaaaatgagacggaaacaaaataaaaagtgtcatttctgaatttgcttccccttcctgctcagaccaacccagaactctgataagattgtaaactctccttagacagaaggaaatgtttcgcagataccacagtgggtccctccttcgcagcataggtctaggtatcgtggtcaacttgacttttgccggtgtaaaggggggaaatctgagatgcatcatgcttctccaatactgtttgctcaggggcaaagtacagatctggtcctttactttacctccttactaaaggaggtccggggccaccaggcagagacattttatgtgtagctccttgctcatcacctggtctagaaatgcccagcactgcctgccactggagccagaaaatgtatctgagtatggttcaaagaataattgctgtgtgattaaagacacgctcagaacagtgagatccttccttatcagtgctatttaaatagaattacagatatttctatttgtcttaaagaaaacatgaataatgatttttccctctctttatttgacacaggaaaccaaaatagactgtgtccaagtggccacaaaaggtaggttgaaattgtgggatattctcctaattaatgttccttaaaagtttattttaacctatgtttcaaaactttttgaactggaacttaattgaaaataaaatgtgtgtattatatatacatatatatatatgcatgaatgcatgtatgtattaggatctgatggtaattaacattgactgactggaactcatatagatactttttaaaataagaagctatatttctgtgttccaagcagttttcaatagttacctttttcagattttttcaaatgactttaatttttatatgatctcagtacacgttttttaatccatagtgtcatgcctggtagtaccacatctagtgaatcttcatatgcaaaggaataaaatatcacycactatttttaagtagttctctagttataatagcagtagaaagtggagtctacgcgggcttttttcactggtggtgcgtgtctctctgaacctagtaaccaggttatgttgctgtggagcatctatttcccaagcctggttaaaactctctgagagaatgtgatagaggatgagctgcaaaagtgggtagggcgagttaccctgagctcccccagcatctcctgcagaagcaagtgcagacgtgtgtttgtgaacatgagctgtcatctggtcaacttgacagtgttgttttaaccgtcacatacagaaatgtataagaaatgctttgagaaatttaaaatgtcgtcttaaaatgaggcaatataaattaacactcaaagtcaaatacaatcattyagatcattggagtaaccatgaatacagtgggaagttctgtatgatttaatttagagacgatggtaaaaacacatcattaggtctgtagcagaagatttaatcaggtcatacttgatgagttgtgttggataaaataactttttgttgttgtttaactctcaggtgaacatagtttgaatataccatgatgtacatgtgcattttcaaaattctcactgaattcttattttgtgaacttacatgactcttttagtcagtgttagctcaacaaatatttcttggttgcatgttttgtgccaggcattgtgtgaggtactcacctcatttgtatcttgtttgtcctcataggcttgtagttctatatccaaaaatctatttatactaattttaaaacactcaatttttatatcatattgtacctaagtgactttatgtatagaaataaattgatatttactgaaattatagctgcttatgtgtttcataaactgccgtatgctatcagctattaattattacaggacgatgaagcccttgaaccaggtatccattgatgctcttagatctcaagattatggtccatactcaacaacaggaatttcaaaatactgctgtattacatttcacttacacttaaggtctgaaaaagtaaatcctgttccagggcccctagtttataatgcttaacgtttaacgtcacagctgaaagttttgaaatctctttcatgcgtgtgttctcatttatttcttcattactatgaaaagggaaacaggtactgctattcttatttttaagatgaggaaaaggtgtatttttggagacgaattgactcaccaaggtgactcagctgataatctgggggtcaaggcctgcactcctagccccagtgtttctttcaccattgctcatggctcgtcacccagcagcacctctggccagtgacagtattgtgtagtgtaagcatcagacctcctcttggtgaggattgagtcactgcccaatttactgtgaaaacaacaraatatctgtcatcatgctcatttacatagttaaataattatataaataacacactagtaaatgtggaaacctgacaagtttgctgttttcacaatagattgaattagatagtgatttggatcattttcttccatcagctagatttcatcaatattgtaatttgtttttcaattcaccaaaggatgattaagcaatcagatgacctgattgactaaatattccccactcctattttctgagtcatttgcaaacatttacacagcaacaaactctatccaaagaacctcttttggggaaagagggacacattttaatatttcctgcataacattgtcattctgtttcataaaatcacagcacaagaggaaaccttggaagatattctccctccaggcaaaactacactgttttgtgctattttattaagttctacatggacggattcakcaaccctcctttcagcacagtgtaatgtttcaccaccttttagtcagaaaatgtgtccctattgatactagaaattctcttgcaacatgggaagccattccatcttgactacatagtcaaaacagagaaataggaagatctaataactgttgataccacagagtaaagatgtttaaaatgtagaagagttcaaacatcctgagtgtgtgttgccacatactgctcacagtgcgatggcttaattgagttttcagatacagaattgctttcctaagcaacattttgaatgtacaaagatttcaatgttctcctgaaacaactgttgacaagtatctttatagagaaagtatggaggtggatttgttttcactaagagctagcttataatttaaagtaagggtatgtctcttaaaaatatatttcatactatttataaatttaatgcagtgattattttaatcatattccaaagacatattttgacactcatcatcttaaatataaacttcataaaagttagacaggaaaaaacctaagctgtattattatatatctccatacgtgtgggggattgcctatatttttatgcatcctcttcgtttatgcacctagatgaatttcctataggtacaagttaactataggcaaactcatcacagaatattctctcttgagttaaaagataaagacaccataaaccagggtatacgtgatgtttatgtgttacctgcccaattcaagggattgtttttaattgtatagtggagtgaatagagtagcttttaaatatttcttaaaatctatgaaattgtatttttcattaacattcacatttttatagttggatttttttatgaccatttggtccaactgtgttttagtgattagtgtatgtgttttctttagcttttatattcaccatggtggtctcatggtaactagtagggtggaaactctttgcagctagttttagaaggcttcattgatgatcaattctaaacttgtagggtacactaaaaaatccaaatgtgttattagtaagttaatttcttatattgaatgaggtctattcattctaattgatgtaacaatcagtttaaagtatgcacattatattaatcttccataaaataagattttttcataatatgttagcaccgcatgtttgtccttggcagtatagccatttgggagctttcctgttgttcatttaaaaattatttgagtgcctccttgatttataaaagtgctttggggtttttttgggttttgatatatggggagcagtcatatatgttaatttgatcctctccttgctgttatttgactattgtctagctcaagcttgtacaacccatggcccttgggccacatgcagccccggatggctttgaatgcttcccagcacgaatttttaagctttcttaaatcattatgagatttggctgggcatggtggctcacgcctgtaatcccagcactttgggaggctgaaacaagaggaccacctgaggtcaggagttcaagaccagcctggccaacatggcgaaaccccgtctctactaaaaatacaaaaattagccgggcgcagtggtgggtgcctttaatcccagctactttcaaggctgaggcaggagaatcacttgaccccgggaggcagaggttgcagtgagctgagattgcaccattgcattccagaccagaagacagagtgacattccatctcaaaaaaaaaaaaaaawatatatatatatatatatgagatttatacatgggcttttttttttaagctcatcagctgttgttagtgtattttacatgtggcccaagacacttcttcttcttccagggtggcccagggaagtcaaaagattggacacccctggtctagctagaagtcaaagcaaaaacttcacgtaaacacatgctraattattttccaaaactattagaaaaatcagactgtaagccttaaacaaaaagaaaacaaagcatttttcaatgttatattttaagggactttttcatgaaaaagttattcatttcactgtttttgtaagtaacattttatttaagttaaatttgtaatggaatgtgaatatggcttattggaagaccttgaggaaactttgaaggatttccattgtcctgatataatttctagattcagaaatttgaatgtttctttttttaatcactaagctttttgagaagtttctacagactgtttttctgttcactgttttgttcaatgaaataccatcctttgtaggccataatggtacagaatgaaagagcgctgataaaagaactgaaaagaatgtctgttgagatgtaaagctaattaagattccgtttaatttctcatattctctacatgagaaaaccaattatatagcwagaccactcatatatgctaatctgctgttatttaggctttggattttgaaataggaacattaacattcatcgttcagcattttatagagaaaatgtacttttttcatgtctgaaatagtctttataatgtacatcatgagtatattaaggccccctgagaagttcctaaagaaaagaatccggaaaaaccctatgctttccaaatttatttgatccgaattcattttttaaggaacactsgagtcatgcaaaatgcagttaggtaaatgctggctcaacaagcttccaggagatcccgctgcacgtaactgaratgaccatttagaagtctgatccacagggaccttacatttatcagcaccagatattgtcttcaaagtgtaggattggaatttctgtctttattccaattttatactttgaagacaatatctggagctgataaatcctttatcttttttcattataaaagagaatatcaccaaacttagtgataattctcttttataatgcatctttattgatattttaagttagaggtcagcaaactttttatgttaagggccagataataaatatttgaggccttgtgggccatatggtctctgtcacaactacgcaggtctgctcttgctgggcaagagcagccataggcaatacattaacaattaagcatgtgttccaataaaactttatttgcaaaagcaggtggtaggcctgctggcccatttgaagataaagtatagcataatcaaattttttcctcatgactaaaaataatagttacaaataaacactttacaaagcagaacatagagatcatataaaaatccttcctggtatttataatatactttttacatggtagacttagcttctgattatagtttgagttcctttttatttgtgaatacctggctgactgacatagctattttcgagtaactttttgttcatattgtttacctttttggatattaggtgctctgtttctctttttctttttctttctttctttctttttttttttttttcttgagacagtgtcttcctctgttgctcaggctggagtgtagtggcgcgatctctgctcactattgcaacctctgcctcctgtgttcaagcagtcctcctgcctcagcctcccaagtagctgggactacaggcgcaagctaccacgctagactaatttttgtaatttttttagagatggggtttcaccatgttattcatttgatcttaaactcctgagctcaagcgatccacccacctcagcctcccaaagtgctgggattactggtgtgaaccacggcacctggcctgctctgtttttctataaaacaatttcatttttctcaaaaggagaacaggtcagactctcctacagataatgcggaactgcataggagtattggttggagcaacagtagtctatgaccaaacaaaaatgttatgtgtataaaacttggaattggtaccaactttgtaaccatcttagaaataacattttactgtgtacagcttattataacagtattcaaaattgcataatacgtcatattaagaaaattatctctgtaatgcgttaatgcactgggagctgcctattctctgaccaaactgttagtttgttaatctcacttaacaaaactagaatatgttcattaataatgtgtgaaagactgttacaccatttttaactcagttgctgcagttgtctagttgtaagcagcactgcttgcatggtgcagagggatatttcaaaatattatgcagcagcagttttgggtttaattgtctrcagatggtagatgatctattttccttactcgctgccacatttctaatagtacccaggctgttccatgtaaattagtaatctttcatgtaagcctgtccttaattttccaatatttttttgcatcattttccagctgtatcatgttagaactgatgttttaattttctattttttttaaatatctgtgtgtcattaatgttaaccacttaaacacaactgctgagctgtgcaggcaaactaagaagccagcctggtctgcttcaagactcttaatcatttctttgttcacatgttaaccatgataactatagcaaaggcaattcgtagtttctattcttttccaaccaatacttggagatgcattttttattctcttaaagtgaaaaaataaagttcctgaatggaaagctgcatgaaatttagatatcagagaaatttttctacataaaaacgtttttagtgaaagagtgtaatattcttctttacaaaagggatttagtaagaagagaaaacattgtgatttcaacaatagaatgttgaaaaacctaatacgttctaaaagcctaaagtttggatcaccagaattaacaatgaatctttcagcaccacactcaatttcaattggaaacactgctcagtcttcacctttatttaggatgaatgtttttggttttgttttcctttttttcttcttcagttgatctatccaagatctcagccaaaccttgcaactgtgtcatagttagaaatccaactgcctgactagagcttgtttaagggaaaagaattcagaatattcagcaccttgctatgttttttttttctttttttccttttctttttgttgttgttagaacaaagttgagacaatttgatatactgatggggattcttcttgctagcctagcttcagtctggcttttttttccctcatgcatgctgacctggaaatcctcctttgccttagctgcgataatcgtgactcagcttacaacaccttacattcgcatcgcccccgctgcaggcgacggccaactaacaggtcagatgttcaagtatagacgagtcatcttgcccatttcccactcatttttctcagctctgtttcccctctacatttcctcctttgcttaaggcctgtttacaatgtttcagacccttggtacagacctttgctcgtattaaattaagtgacatgcttggcctcttctgtgtgcacatttatatccatgcattaagtacaactccactgcatgttttcattgtgtgtttggtctgttggtatgtttctttctagactaatgttatatagaaatgaaatttgctggacttgaaatagcaataacatcaaacagggtttccaacaaaatacataaagatatattcctagttttccaaattagtctaaaatggtattcagatttgagggtgcaagagatttattttttaccttgcctggtctagtttgcacatacatttagctatacacaatcttggctgccagtagtattaaacgaagccccccaaaggtgtttagggtggcagtgttctaacagctttgtgtgtatgtacaatagttgcagagctgattgcattccttatagatccttgtttcaaagcatagtgtttatataaatcatgcagtggcatatctgcaagtcaaatgctttgaataatttaggaaagtttagaaaaattgaatggcttagagtcatggagttgaactgtgcttccttataccaagagaagtgagcttgttcactcttccctctaaagccttatagacatctctatacattcatataggaaaagagtccagtaaattacttcagattgaaggtgagtagttagtgaactccaaaagacaaacttttttgcttcagcaaaggcaagtcattgtcaagatttctaacatgattacctgrgcaggactcaaaattctggtttcagaagcacctgcttacagtctaggcctgatgaaagccaagtaagaagcagaaactactttctatatgattttcactccagcaattgttttttgtgtgtgaaactaggcaatgtcccctaacatttaagaaaatggtaaagcttaactcatggtagtaaattacaaatgtttaagttgttctgtgaacttattattttggacagtaaagaaaactaagcctcaggaaaattgtagactgatgttataaggtaaagaaatgtaaaataattctatttccttctccactggaattctgtacatattttcagttttaaagctatcaatttattgacagttctgttgcccttgcctgcaagtttcttttaagagtatttcttttcctgattgaagttctacttgttacagactcttcctgctcctgaacttctgaagtgttcttcccacaagtaaaagtatttgagggacagtgcctttcttaataagtcctcccctctaaaaccttgacctttcaggactggcctgtggcactctgtgtagggttaggagtccatcttgaaggttattgggatccttcagcaactctgaccacccattgtgtctgagctggccccagactcatcagtacattgttaaaaatgggttgttcccaccttcataaaacaagtacttaygaaatataattcagtagtccttttaccaagctttacctataatccactaacttcagatgaagcatgctgtttactaggaatgaagtaagcgaggcttctgaatatagttttcactctaaaactcgcctgattcagaagatacttcataaagcagcccccgtcgtaaggcatttagacacagtgagtgtcattattttggagctagtctgaaggacacacacacaactgcagtgcatggctgctattcctcctaagggctacaggtgatctacctcatttactttggtttattagggattaaaatgatggtgtatcagaataagcctcaaaaaccagtaaaaaactactcttgttctttcttcagtatttactgctggttttaatgatggttagtcttacccagataaattcacactcaaataatatttcttttgcattttccatttgcatcacccatcaacttcgatagcagtgacactgtcttttttaagggatttattcatgagtcatactgcaagcctgagacttaattcattcagtcatttatttgacatttattgagcaccttatgtgtgccaggtatgaatcgaccaactcttttcaggagttttactttgtatggttgcctagacaccttggcatcaagtacatttgyattagtaaccccaaaacctacataagtgcatactcagatgagtgaaaaattggtatcatacttatcatttagcaaagctaagaaaagacagcagttttataactgatgggaaccaaaggacctgtatttcaaaccgtttctcactgtggtaaacagcctaggaagtggtcrgtgtgacagctctgaacattttctatctgtgacccattcaaccgttgtgtttaatagatcaatcctgtcccttccagaagccaatagaagatataggaggtatacattctgaagtcttcagccattttttgttcattttgttctaactgtgctgacatcttgcccctaaaaatcctatttgatgctatacttgcactgggaagcttttgtgagatgatgagtcctttgccttgctgtccctgttgtactggtacgtggtgcttgctggttaggtttcccttggtgtaggtgggccctcccctacttgtctaccaccaatgaaaacaagaaccttggtgatctgaccccagcacctaggactgtgccaggcatgatagccactcaggaggctgaggcaggagaattgcttgaacccgggaggcagaggttacagtgagctgagatcaagctactgcactccagcctgggtgacagagtgagactctgtctcaaaaaaaaaaaaaaagtgctcataaatatttcttgactgagttcattgaacggcccagttgtcaggagggttccagagaaggaatttgtggaatgctaggacatttcatgagcagtcctgtcattgcactagggagtgttgcttaaacttcttgaccccaatcaatgataagaaatacataactacccagtactgtatatacacatatacatacatgtacatttaactgtaatgaaaacttttagaaccgtacttccaacactactcactgcaaacataagatataccctgatttttgtattctgttctacattattctttttcatttttttaaaaaaaattctggttgctgccttctaaattgatttcatttcccgttaatgagttgtcatccacaatttttaaaaaaatgctttgctaagttactaactagatttaggagatagtaaaggggagtggaatgtctgattggaatgaaggttctgtctacctcagaaatcctactctaaagagtacacacagagtaagttctagaaattggaaatgcccctagtctctttcttccttttatctcgcgattcactgttcataatacagaaatgatttgggaagaaagtagaaagctatacatggtaggaatttctctttaaaaactttttatttttcacatatatctaggctttttaaattaagatatctttgtttatgatttaataacccagccaaccctgacatgctgtggagaatgctatatgtgtgtgtatacatatatatatatatatatatatatatatatatatatatatatatatatttttttttttaaatcagtagacctttccattgcaaataaaacaaatcctaggtgtttcaactcacaaaagcatgaaacagcattgtctgtctgtcttgttcccagtgtagcccacaggcacccaggaagtgtttcaaattgtttgctgaatgactgaatgaataacagttgatgacctgtcttactaaatttattcctaggtattgtatagctttcatttattattgtgagtaaattttgattgaggggaggaatattttgaaattggtttattttgtcttcttttgactgattttatgttactttatgcaagattrcaaaatatctctttttaatatgtatatatatataaatttaataagcttttccattgcaaataaaacaaaccaatggtttttcaacccacttacaaaagcataatttcgatcacccatttcttttggcaagagccataaaaaggttgaatgttaattgattttctaagagaatgacccagccactcccaccaacattatctgttttcctcctactctgctgactgtctgtccatttctctacttcccaccagtcagatcccatytcacatcctaagtcctctttatcttcagtaaaccgtggcagagctaagatgtaggtagataatgtctgtccttctggggacccaaggttctctatttgtaagatgaagatataactgattggatcttagccacactgagtagcaaggaggacagtatatggcttgaagatggtgggattgtttactgaacattagcttagttagtagcagtaacagcaggtacaaaggtccggtggtgtgatgaagcatggtcagatatgaagaattgcagaaaggtcatcatggctggagagcagagagcgaaaaggatgtgtggggtgagcagtaaggtgatacaggcagagcaaggccaactgtgaccgtgtaccttacattaaggactttggtcttgatcccaggaggagtgggaarcaattggagtgttttaggagagacagaaaggatcagttttgcactgtgtactccaagccacactagaaacattggagaagagatgaaaaaggccaaaagaccaaaagtaaaactataagaaatggaagactgtccaacacactggaaaaaaaagaacagagtaagtagatgtgaatagaagaggtaaaagccaggaattaatacagtaagtactggtcatggggaatggatcagctgcagccagcatggaggagcacatgctagggaacttaagggacagggtcagccatatcaaaggaatgcttagaatcccttccaggggccatattttatatatctttaaactttcctcagcctgccactcagtgcttggcacatgaacggcactcagagtccagctgtattgtttttttttttttttttgatgggatgaagttatttgtaaaagataaaattcccttgaagggtgaactaattttcacactgctttttaaaaaaaataacatccttgccacagtggcacttccacctgtgactgcagtcagrgtgaatgtggtttcaggaggggcaactggaccaagagctacacagaccccctccagttagccttccttcagacggtgcatacagtttagctctgacagaaaccaaagttgcagctttctgtccctgaaatatgtagctttagggagctgtcctgtgagcactatcctctactactagagaagctatcattcattcattcattcattcactcattcattgtttccatcgatgcgctttcaccccctaggagagctggccctaccatgagctctacataagagaggaggaacattcatggaagtgtagggtatgctctttgctctgcaggaacttatatttagtgcctttgttaagaccaacataaacagttcaataaatgctccacttccataagcttaccaacaccttgaactatttgtaatagtggtaagtgggtaatgaactaagttaacatatactcagttgcactcgaaaacgtactatctctatgataccagagtcattttcagtgtcagaagcttcaatttaaccttttgagagaattttggataaaaattaagggaagaaaatgcctcctttagatttctttgtaaataaaagatggctaaactcttcatttaagcagataaccaactgattgaaagtagtggctaacttaaaactaccattttccaactaactaggtatcttactttttgtcaaatgtagtattctgtaaatataagatgattaacaattcacacacactgttgtgggcatttcatattaaatggcagagggggatatcagtgctatgtgtttcagctacggaagttaatatagagggttggtgtgaggagaatttgagatttttgagattttcagcatctctttcaagggctgcttgaggattctgaaatttcctttctggctagaaagaatgtaaaatgagggtaaaattttattctttctgcaataccagctgactgcattttaatgggctatagtgtcactgttgatttattgccctttttgttcttttatgtgttatatttgtcattttgctgtggcagtttcatctataaaacagtatagttacaagaaaatggtgagaggatacaggcatgccatgagggatgctgttgcttttttcttgtcattwtttggaatggaatactgagtcaaatgtcaagtatttgatttcagaaacaatatattttaaaatctctatattgcactgaaatagtattattttccatttgtattatgtaaacttaagaatttctatgtaaaagattttcaatgtataaaaacaatttaattttttgataccattttgtggttttcttttctatcagcagtgtgatgaaggaaaccaaaacaatattttatactgtcttttgtttgcttaaggcatagagctttctggcttgaatggcatatattgaaatttcatattttaggaaacctaacttttaattttgacgttaatttggtgtattrcgcatatccaaaaagaatactgaaaagaaagttttgagctcaaaattagccaagagtttggtaaaagatacgaaatactrtgaaaaagaaagtactttcagtttaaaaaacacttgaagatttttgcatgaaagattttatattgatagtgaaattgttcttgcctttttgataaggaaatatattatttcaatttttaagaaaattaaaccagttcattcttgatgttaataaaaatgagaaaggctgaatgttttttaagtatttatcaaagctgaataacaatatctgtgtcactagttctttatctttactctggtgactagcatggaactagacacatagttgctgttccctggctgtactgttgatagataccaattgtgatattttgattttcatccatttatttattttaggaaattattactacaatttaaagtataaggaatcaatattcagtctaacagttttcagtctaaagatcccagtgatgtcccttagcatctgtaggcaaatggctgtgttgtactgctgtgtgattaacgttgtggttgactttggatttaggctctcttgtacataaacacttttagattactattattataaaatacctagtatttgtgagagttctttgaaaatatttatggttgtgttccaatatattagatccattcagaatggaaaggaagtcagaatttccktcatcatcataagacagcaggatgtagaggaggcaacagatcaagaaaatatcaagaattaatttagaataaatgatacccctttttgaagaaaggattcttgttttaaatactttcaccaaccttgtcaaaaaatcaagggagaagtcaggctggtgaatggaaagagaaaaagcacagtccttagaggagatgcacctcatttgccctttcagcaatatcagtgtgaaacgtgttcttccatgtctccaatgggctgagagtgaggcccaaagtcttttaaaagttgtcttctaagattctatcatgttaaaaatatcacctrcctccccattctgcaacatgcacatactacttttctacttttaggattgctgctgttgtttttaatgtgaaaggatcttggatttggcgttcatttctgattatttctcaagtcatggcttttccagcttagctaccctatattcttgaaataacctctctctgtctggggaggttgtccttaggaaaaggggaggagaggtcgctctccatggtggaactgttgagtgagagccgttgtccagctgctgtcccatctcaaatgcttgttgactggaaagcctgggctccatgaaaccgcaaggccaagcatggtgcatcttctgggagcatcactttccttgatgataaataatgcaaaaacgtttttgtcaaaaattgatgtattgtggaatgaaatgcaacatttgcatgctttattagaaagatcaaaagtcttaaaagaaagatcgacagtcttaataaaaatgtcaagcttgcagtgggccacctaagataaagctgagcttcctgctggaatttgttctctctccttcccttaatggtacagatgataggaaagtgtacctcaggggtagactccagatcattttcaaacccacatggcccacttcattggcagttttctaacatgttagataggaatctggacttaacagtyccctaactgtgattttaaaagggaaattcacacaggaactctggaacccaatgcacacagtttagaaagcatgtacacagcaagyagtgggttcaagtccaggcttcttggggaaatctcttgatctctcaacatctcagcttccatatctgtaaaacagggagaatactatttctttacctcatagttagtggtgagacatcgagtgcaaaaatgcacgtagagtagagcacaaacctggctccaagggaaggcagtggaaatagcagttgctggtgcttctcatgtggctttgttgttgttactctaatataggattgttttatggcccatgaggctttcaagatgactcagtaattaatccaggccactgccagtcccaagttgacactgcagctcttcagagacattcaaaattgaacttctgggaaaatgaatggatttcttgayagtatgtagggtattatttacttgaacaccatgtggatgctgtggtctccaggagcaccgaagcaagagagggacattattattctgtcacatgtgaagacctgtgatgagtctcccactgatgatattttccatttacctgtctttgggataaaagcagcatcagcatgacccaggctgttaccttgctgttggcaatgataagcaatgctggtgttggtgatgctgatgaataaagttactgcattttcaaatacagctattttatttcaagcagtaatagcccaaaacagagcataacctattttatacttccctgccacccagcacactgaatagaacaccaggctccctttcttggccatttgaggttcctttgtccctcagcgtccttagtttagatgaggatgcctttctttgtgtttatatttcaacagcatcagttctcaagagagcatgaggggatgcactttaatagaactctattatatggattatagatatcttatgtaataaccttttcagacactaagtatgaaagtagacaaatataaagctatttgtaagggaatgagaagtcttacttagaagcagggcttagccacgaattttcttcaacatgctgtttttctgtttagaggaataaataactgtctctgagaaacaatgtttgaaaataaacttggcacctgcctaggagttaataaatggcatctgcttagtatatcgatcagtatctctgatgagcttttccatttgctctagtaaatatccaagcaatgcatcactttagcagtgtaactgatgttcagtttaatatgtgtaatttacttattggtgttgctaatgatgcagttattaattatggcttattattaattataacatagtttattcaagttggagctcttagtcaaaacacatactggcataccaacttttgtctgagattttgtgtaggtgttgtccttacagtgatttaatttggtattttttactcaggattttatgtaatacctcttcacagtaaacatgataaacaaaagtctttgtgattgtagtaccaattcagtgggttctccttatatgtctttgaataatttctttagatattggtatatgtttatgtacaaatgcacacacgtgcacataggtaaagacagcatcaaagtgagttgcatgtgtcttttagccagtttagggacttaataaagggaattatttatatttctgccttacttctatgagtaacaaagtccgaaaatgctcccatggtaggatcataggactgcaatagccattttgttaaataaaattacttttaatagtttgaatcctactaattatcttattagacatttctctgttttttactttctgaagagccccagaccattgtaattaatatacagcagaaattttggctagtttaaagacttctaaaacaaactccatatacaatcatgacaaattacctatatctatttaatcattgcaagtattgagtttataacactttattcttgacagatactcactttgtgtctctctgatatgtacctagttaacgttctagtcattgttggatatatatttcacagcgttgagtgctgaagatataacgttttgccactagtatttatttccatgctcttacttcctgttagtctctttttatcattgatgaaagtttggccagcaaattttctggtaaggattttgtcttagtctgttttctgcagctgtaacagaataccacaaatcaggtcatttataaacaataaaaatttatttgactcatggttctggaggctgggcaatccaagagcattttgctggtatctggtagggtcatctcatgamagaaggcagaagcaagcaagagagacagagaggagaaatcagaccaaactcatccttttatcagaaacccacttccacaataatgacattaatccattcatgagaactctgacctcatgacttaatcatctcttaaggactccacctcttaatactgactcttacaatggcaactaaatttgcaacatgaattttgcagaggacattcaaaccacagtagactctcatctgtcatcaccatactaagaaaaacccttcttttcttcctggccatctcttggcatcctcagtggagctcatgttcaaacatcttccttctttcttagcatgtgagggccacaaagatgagtaagactacttttgtctcaaggaatttatgtttagtgtatgacataaagatttaccaaaataactgaacttgagtttgaaaatagttaagttctgtgcaagaggggacaagcaaggtgctctaggagttcagcaggagagagaatacttttctgcaaagcaattaggagcagtagttggaatgtgtggcctttgaagatggataggatttgaacctacacaaattgagtagggaaagctcctatgcagcaggagcaaaggccttgggaagggaaatattgagggtttggggaaaytgggcatttccgtttggtgtatttcagaaaggagggtggcataatattaggaaagggggttggagttagctcatggaaggccttttgaaataatcatttagaagctcttggatttgattttgtttttttaaatgaaagagtgacttgattggagctattatttaggaagatccatacggctgcactatgtcaaagacactggctaaggtatctacttgggagtcaggcataaaaatccagaagagaaatagatggcagtgagaataaagaaaaaaatatgtagcatttttagacttgttagagattgggaaggacagtaataactgacctctctagtgtcagatgacaattctttaacccaagggcggaataaacctcctttgtaatttattccagtttcatggactgaatacaaccaaaattcatttacttgctcttttactgaatactgactacattgtgcatagacaggggaaagcctctctcagcctttctctgtacaaacttgaactcctgcttttacacttatatgttcaaaaatatttttctccatctatacacagaccactcatggttattgttctctttacaaatgcttcttgtgtcttttacaatatccgttcagtaaagrcttgtcaaatgcccaccgtgttaaagagactgttaatcactagacagcaaaggtggtaagaaatgatctttactcttgggaagctccgatggcaggtcacctgcttgccttctcctgcattagataaatgaccctagttccttttatccttcttcgtagtccttcttttttacctcgttgatcatttgtgcttcttttctttgattccttttcctcatccacatgatgactagtatatcatgctccaggattatgtgcatgccattactctcatacatttcagaattgtattgatcatattaccagatctttcttttctgcactttggccaggaagtcctttctcctcttgtttttctttcggaattattagttccttattgaattgttcattctttcctttttcattctttcctttttcattcttttgttaggccctcctctttacaactgaccaagatcacttttaacttgagtcttgtattccatagcatgagcaataaccacttgagttttctgtattatattggggaatgctgtagtgcaatgaaataggagtcagcttcacagtcagacaccctgggttcagagtatagcaccattccttctctttcactgacttaggacaagctgtttatcttgatggcttctgttgcttcagtttcctcatttgtaaactggtattaattatacttcatggtataatattaaataaaaattatataagttacccagcatataaagtaggtcttcaaaaagattagttttcttccttcctatcttatttagtagcacccaggcagttgatcaatatactttaaattcctttacaattcagagtgtcttccaatctctacatactggggctagtcataaatgaggatttgattccaccacgtttgcctcttcattgtataaaaggatcttttcaaatagtgcaatcaatgatggaaattggatcgctgagaaagtaagatattattatattaggagatgttttaaggataacaacacaattacattttttttctcattttgccatagtctgaaaaacttccccactcatactttggagccatagttctagagttggttttttctccatgttgtgtagggaatccccaaaagtgttacatagattcctgggtcctacctcagacctttgatccagaatccacggggaacccagccatctgcatgtttcaaagctctccaaatgattcttcacccagcctgagttttaaacttcctataattggagaccctctgttttagaatatattaaacacaacgccacaataaatataagccatatttattaaagccatttattgtttgaggaactattgtgtgtttactaaatgagagtctggagagtacatgacttccactctctcctaagaccgtgtgagtcctcatcacaattctaaaaggccatcttttgtgtgtgtrgttcttaggccctgtgaaagtcatgtcacacatctcatgcaatttgctaggctctacattttttgagcctcagaaatactgatacttctagcaagcatacagaatagactaggtatacttactttttgatgagatggtgaatgacaaatttcagacagcaggaaaagctctaagtggtttttgcaaacaacaactactttgtgtaggaagctgtggtgatcctttctcccacaggaaaaaatgttaagaggtaaacacgaggtctagaccatgacctaaaatacaaatctggaagaaattttgagagacagtaggtttccattttaatgccttcaaagtttagtttcaagmaaatggttggaaacttccattctgaactacatcaccttcaagaatcatctgttttggaagcagccacccccacttcctttcttgattattcacttatgtgaaagttgcacacagttgataacttattattgacagtttgtttccctattttattacttgataatgatttgagaaattcaaatggaaaaaataaaactatttcatcaaaatagtaagagcagtaataattctcttggacttttagtgtccagatgataagtgataaggctttgatagatcatcttctccacagggcgtcagccacatcaataaatgaggcagtaactgtcatgaaattagaacaaaaataaaaaaaagattgatttttttagagaagatatatatcaaacaatccattatctcagtcttatatgaaaaattatgtttctgattattacttgtacattgtatatgctctgtttgccctacactggaaattagggacagaagaagagttataaattcaaaagcataatcaggttacaaagaatacacaaaatgtgactgtagattattccaggaatagtgattgacttcgcattcccaggaagaaaaacaataatatgtaatttaaatgaaaaatctaggaggtgttttgtgattatgtataatgtgaagaaggaacagctggaaaaaaactaaacaagactgcaaaggattttaattctctgggcaacaagacctgaatgaactgtctcacaatgatctttaaaacaaggatgttgctgtttttaagaaaaagtatagaaatttacctctgcatatgttcacacacacacaaaaggaaaattaattaaaatagagtattccatgaaagtcattaaaatgctagcacaaagtgatggagtactgaatttaaattttagattatcttttgggaccagtgctctttgaaacgcacttgaaggaacaatatttttacatatttccactgcttccattttattttctacttttagctcttctccctgtcgcatctcttaaggtttttcagcctcctcagcttttcttttcagcagttcccattgttactgtccttagccccttttttcttcctttctccccaaaataccaagagtggctttgtggtatttggtttgccaccgaaaccttttgcatgtggtgtgaatggggtagtttgttgctcaggttcaattcagacattgaacccaacacacagccccagctggccatgtagtcccagagccattgtgggtgttgtcacctgtacacagctgactgtgcctctgtgagtctcttgtgtcctgctcgttccagccacccttgcaattcaggcaggggaggctccaggcctgggtggggcagtagccttcccatggctccccaacttccttcccttcccttcttcagtgagcctgcgtattgctgcccagttgttctcaaggtactgttctgttattttctgtggttccttatttactaaatttaatctgggctgtcctacccagtgagcaacacccatcccaccataaagcctcagttccaaatcctcttcccaatcacccccagcccctgctccagaccctgcycttgaagctagtatgtgactccagaggcccctttgttctggcttatgaggcactcttcccacccagcgttgaagccttcccggtccttccagcccattcattatcgcagcctctgacaaggagccctccctcatcccctccactcttccccagctggactctgtagcttacctgtgacacttaaggcttctggccttatttactgtggtcaactccctgaaggaagaggcacatactcaactctaattcccctgcagagccttgttccagtaccttgagcacaaaacgtactaaataaggggctgctaattcggaggctgtggaagccaacatgagccacacatatgaacaggacagtgctggcccacgttcacggcttcrtcccttatatttagagggaacgtcaagtgtcacagggatgcttctgtatctctgatctgaacactggtcacacccctccccaatgtaagtctgagtggggatcaccccctaccttttttttttyccctcctcttccccttcttcatcctaactaggaggagtgaagagacggcccagggctctgcatgctcttggatacagccacagccccacttcccaccctcactgttggctcgtggccatcaggattgctctcactggcccaccttccccttctctctcacgccttagcccccttccaaccctgtcttctgtgtccttggaactcctggttggctaccagcagatcccacccatgcccagcctgggacatccctcccttccctcttctagacaacttcaaaactttttggcctgagatttctcacacctccgttctggtcctcagtctcccctcatcttcttggttcctttttccctgggaaaatgaagccatcaaaagagacctttcaaatgctctgctcccagaccagcgcatctgccaagagcctgtgcattgctgcrtgtgtggctttctgctgttcctctgggtgaaacatcagccctcgtggttctgcgcgctggtctcacctcccgcctctgcaagggcttccctccagcaggcagctcctttccctcccgcatcatcaacttgccctctctatggtatcattagcattcgcattcagagatgctgtcatttctcccatcttaagaaaaaaagactgtttcgtgatccctttcttcctctctggctgctccgtgcggatgctccctgtgtctgtattcgcctggacatccgcctccatgtggctgagttccatcctccttgacccgccattgtttcccttgttcacttcctaagtgtcccccggccgactcatgactgtaatcaccatcttttttatgacaacctcaaatttatcttctacacccagatctctcccctgtatatccatccaactgcctacttgctatctcttttgtatgtcaaatatctcaaacctcattggtccaaaactaaactcttggtctgcccacccacccctccaaacctgctcctcctgcagttctcgccctgtcagttagtagcagctgtgtctgtccagtgactcctgccagaaatctggttgttatcctaacacactcgacatccagttcatcggcaaaactgatggctggactgtcacagcgtgtctcaagtttgatggcatcttgccacctgcactgctaccttctcactccaagccatgagtgtcttccctgcatcttcgtaatagcctcrtaactgaggtccctgcctccaccgtggccygctacagcctgcagtacacacggctgccgggatagtgttgttgaatataagccagatcaagttcctcctctgctcagaatcctcccaaggcttctcaagcagagagagtccttccagctatctaaggaggtgtccccaccctaaaattatgcttcaccttctccgcagttcaccgcactccagtcacactcagtatttcagtctcatttgcaccttttccctttttctcctccctggatgtcactctcccactccctttcctctttcaggtctctgctcgaatgttattttctcagtaattccttctccaatcccccatcctaayagctgccttgccttcaccccccagcccactccccttgatttttctctacagctagcctggccagacactgcctacaatattggtttaccttggtgtctgtcttccccacaaggatttaagttccatgaggtcagaagtttttgttttgtccatctgctcaccactgtattccttaaacagtgcttggcaagcagttagctactcaataaatgcttgttgaataaatgaagaatattgctggatttttttcctccacattcaaggtcaacctcgtactagtcaccaccgtgcaaagttctgcagctgagctgtccctgcggctcttcctaaccctgccactcccctccckttgggaaagcttcccgttcactcggggtgaaagcagcccgtgctgtgggcagcatggtcagtagctctgggcaycactgacagccttcatggccttctgggcttgtacccttggatcttctgggaaaatttgtgcagccagttcagtagtcaaaattgggcccagacctcaagccagtggctgagtacatcgtgttctcagcctggcttgctgctgttatttaatttaatgttgaacactgggccaaagtggaattgttttctgccaagttgaaaaccagctaaatactgcattggttaatcattccatttgttttgagtttttttgtttgtttgtttgtttgttttacatactagatgttataactgaaatcttaatgcaatttgactggaataccactcttttttattttcttggccattataaaaataataaccagcgttatcactaggagtcagtagactgggcatctgtgaggattatgctctatgattttagcagtctcttaatctccctgtaatatttagcttattcaccagtgcaatgaatacgatacagtagcaggcctagataatatccactgataaatggacacatgcaagtttattctcttcaaaaggaactaaatgcacactgctgtcctaacagaatacacacaagaagagaaaatgccttttaataagcaattaaaatttatacgaaaaaaaggaaaagtttataccatgagaaacctggcaagaaaataacaagaccgagggggaaatagaatgaaaacaactcttttgccaagcagtttagaaattatactgttaaattcatagatttgggtgaggaaaaataaacaaccatcagttgcaaccatgttctgtcaaaaatatcccctgtccaaggcccgctgacaggtcataaccagaaccacatgttcccaaagcaataaaagaggagagaggagcatcctatttaaggagagcctaaagatgttcatttcaggcagggatagagggacagggcacaggcaggaaagcaggaacttcctgggcaaggggyctggagtcagtgacacccacccatcaggttatccgagggctgtttgtgtttacactgatgcttctgcagagtcctaaacccaaacacccgactcaaccggatggccactcccaggcagccctcccaccttttctgagtcactgtcccatttagcgtggttgctaccgtcatcacgttgcaactgtgtcaggccaagatagaacatttcattcccttgacctgcaatgtgaaatgagttaaaagtcagtgctaagaaatgataatactgagcttccacaggctgcatagcaatgtgcatgctgcttcctaaaggggatgaaaggctgcaggtaaccacccctccttggcccaaagcagaatagtcattcatcagttcccacagagccagaccctcctctactgagtgttcacaatgtatgcattacatgtgtgctatttttatattaaaatgtcttaaggtaaataagtttttctaaacattttttcccaagtgttgcatttagtgacataacttagttacaaaacataccttaactcatctatttaggaaatatacatggagagccagctatctataactagtgagataaatggaatggctttccagtatgtcaacatttggaagaataaaaccaatttgattttattttaaaaatttgttttaattggacacaaaatcaaaatggaaaaacagacttttttcagtttcgtgaatttcaaatgttacttctttttgtatagattgcttatttaacttaaaaaaattttgtttatccacatacacattttatctttaggtttttcttagcaatttgtttaatgtgacaatttcctcccagtcagccacctggtgatatgttccaatagaatattggagtggtgtatttcagatgtaattaccataaaggataattaacattaataccttaaagatttaactgaacaactagtttgagggatattcattgaatcaaaatagcaggacttattctcracattgtcagaaataaaattgacctgtagaggcttcttcagaagggtttttatttcataaggtgtgttttttgcatcatggctgctgctgttgcggctctcaaatgattggaatatgctttgtcatggaaacactgacgagcttccaatttgcttcttccctgaccttgactcacttcctggggtcagtctaatgactacagccatgttcagaatgcagggcctcatgtataaaatctcaccaggaataactttggaaagaaacatcatttacrtgttcccaaaggacacaaaaaaacagatggaaggtgatatctggcactccctctttctcagtgataactcattttagagtttgtcctcctggtcttgggggctcagacacagtgacaactaaggttttcgtgagtcaggtgacgtaggagtggaaaacctcatgacagagtggaaagagctggtttacaaacactccgatttaattacatttttaccaacacaaaaagaaaattctaaggaggaaaatttggacataaaattcctccattcggaatgacctgtcacctagtaagggtggtgtggctcagagcatcatcacattctgattttaaaagtacaagcccttttacaaaggagtctttttagggaattgaacattgcattcctaatatttttcatcctgaatgcacttagcagaggaaacrtatatttcatcagacatggatttgacattccattacattgtagtaaacgggacaaacatgtctcatgttttagacatgagaaaggggagctaagacagccaccaccactgtaagaccctggttatctcatttaaacagattttaaatgtgggtgccagtggtgtgatcatcagccgcttccactttgtgaataaattgcttagaaggagtcttttgcctaccagatgtgacctagatttagatttccaaaggcagggggaaaaaactctattgtgttaaaaaacaattgctggtaaaaatgcatggtaaatgagcttatctcagttttccaggtgtttggactaatatgttatggaattactgcttcgtttatgaaaaataactgaggaaaatgttccagcaaatcaaatttggataaaggcttagggatagctattgtgctgttagtaagtttttaaatggcagaaagagcaggagccaatagagataataaaataatatttttctaaaaaaaaaatgtttgagaagagtctcatagaaaagggtcaggcatgggtgtgctatccagcttgtatatggtttagtaaaatattgaagaacaatgtgaacaattacgctgctttcagtgcatatgaaagctgtttaaaaaatcaaagcttgtctgtctgctggctctgataagtcttattactctgttaaatgcagcgaaattttttaaactgtggcatctttattctctcttacctacagtctstcctttttcatttcctttcatcttcaggagctgccactccgaaaccagtcccagaacccgagaaacagacagaccatacagttaaaattgctggagtcatcgcrggcatcttgctgttcgtgattatatttcttggagttgtgttggtaatgaagaaaaggtgagctcctagctgttgccaaagatacagttatatcccattgtttgctggaatgttttgtgtgtgtgaaaattctcagttactgaactggctttgataacccagacacatctgtgactctgtgattgttaacatttttcatcatgtggcatggaaggttatgggacaaaaatttagagtaaatggctatgattctgtgtgaatacgcaaagcatatcatatcagaataaccatcctgtgtcttcccacacagtggcagataaagctctgcaaaatcttagaagccacttattcaccaggaaatgtttagtactgatttccaacatactaagacatttggtaatcacaaagatatgagaagactttactttttattatagtgaggatgatgatgatgacagattttatggggcctgtgttatatgtaggcaccgtgctagggaaggtcatcagcacaacatccatgagaaagagaacccgcaaaaacagccygacagaaaaatgcagcgcgggagcagctcgtgttagaacaaatcacagagcaagtggtgtggctgggcaccgtggctcatgcctgtaatccccgcattttgggaggtggaggcaggtgaatcatttgatcactttatcccaggagttcgagaccagcctgggcaacatgacaaaaccctgtctctacaataaatacaaaaatttgttgggcgtggtggcacacacctgtagtctcagctactggtgaggctgagatgggaggatcactttgagctatgatcactccatggcactccagcctgggcaacagggcaaaaccctgtctccaaaaacaaacaaacaaacaaagttgtgtgttacaagagccaagggatagtctgggggagagaaaaacagatatggccataataagtgatcctcacctcccatacttgaaaactatgcagtgtcttgttttgtggaaacaagcaaaaacttgcttaataataaaatcttcgatttatgtaaaaatcaatacaaaaatatagatactaagaattgatggcataaagtttcccaaattgagggaatatgtggatcttgttcttttctctattgtttcgaaacagttgtagtcatgcattgagagtgagttcatggatgggagaaggtaaaggtggagaggttggcagagtgaagactagaaactctgatctggtcatggaaggaggttgaccttgggcctgagactgttgatggcctttgagtaggtggtaacatgatctcatttttaggaatataactctaacgttaggattggacacagtgaggaggggagagagctcaaatcaggaagaccagtagaaggaagagaaagagcaactttagaaacagttaagagttaaattttagtagccatttggagagagaagggacaatatagaaagacttagaatagttcctggtttgggcaagttagtggagatatttctgttcaccaaaatgtggaacataggaactacaaaatggggtgggggcactaaaaatggagagttcagctttgcacattttttttctttttctttattataytttaagttctgaggtacatgtgcagaatgagcagttttgttacataggtatacacgtgccatggtggtttgctttacccatcatcccatcacctatattaggtatttctcctaatgctatccctcccttaccgccctaccccctgacaggccccagggtgtgatgttcccctccctgtgtccatgcattgtcattgttcaactcccacatatgaatgagaacatgcagtgtttgcttttctgttcttgtgatagtttgctgagaatgatggtttccagcttcatccatgtccctgcagaggacatgaactcatccttttttatggctgcatagtattccatggtgcgtatgtgccacattttctttatccagtctgttttctttatcaattgatggtcatttaggttggttccaagtctttgctattgcgaatagtgccacgataaacatacctatacatgtatctttatggtagaacaatttataatcctttgggtatattcccagtaatgggattgttggatcaaatggtatttgtagttctaggtccttgaggaatcaccacaccgtcttccacaatggttgaactaatttacagttccaccaacagtgtaaaagtgttcctgtttctctgcatattctcaagcatctgttgtttcctgactttttatttctttcttttctttttttttttttttttgagatggagttgtttgctctttttgcccaggctggcatgcaatggcatgatcccagctcgctgcaacctccgcctcccaggttcaagcaattatcctgcctcagcctcctcagtagctggaattacagatgcatgccaccacgctaatttttgtatttttagtagagacagggtttctccatgttggtcaagctggtctcaaactcccaatcttgtgatccgcctgcttggcctcccaaagtgctgggattacaggcgtgagccaccgtgcccagccttcctgacttttaatgatcgctattctaactggcataatatggtatctcattgtggttttcatttgcatttctctaacgaccggtgatgataagcatttttttatatgttggttggctgcataaatgtcttcttttgagaagtgtctgttcatatcctttgcccactttttaatgggattgtttttttttttcttgtaaatttgtttaagttctttgtaggttctggatattagccctttgtcagatggatagattgcaaaaattttctcccattcttaggctgtctgttcactctgatgatagtttcttttgctgtgcagaagctctttagtttaattagatctcatttgtcaattttggcatttgttgccattgcttttggtgttttagacatgaaatctttgtccatgcctgtgctctgaatggtattgcctaggttttcttctaggatttttgtggttttaggtcttatgtttaagtctttaatccatcttgagttgatttttgtatcaggtgtaaggaaggggtccagtttcagttttctgcatatggctagctatttccaacaccatttattaaatagggaatcttttccccattgcttgtttttgtcaggtttggcaaagatcagatggttctagatgtgtggtgttatttctgaggsctatgttctgttccattggcctatatatccgttttgataccagtaccatgctgttttggttactgtagccttgtagtatagtttgaagtcaggtagcatgatgcctccagttttgtyctttttacttagattgtcttggctatgtgggctcttttttggttccatatgaagttaaagtagttttttccaattctatgaagaacgtcaatggtagcttgatggagatagcattgaatttataaattactttgggcagtctggccattttcacaatcttaattcttcctatccatgagcatagaatgtttttccagttgtttgtgtcctctcttatttccttgagcagtggtttgtagttatccttgaagaggtccttcacatcccttgtaaattgtattcctagatattttattctctctatagcaattgcgaatgggagttcactcatgatttggctctctgtttgtctgttattggtgtataggaatgcttgttatttttgcgttgattttgtatcctgagactttgctgaagttacttatcagcttaaggagrttaggggctgagacgatggggttttctaaatrcacaatcatgtcttctgcaaagagataatttgacttcctctcttcctgtttgaataccctttctcttgcctgattgctctggccagaacttccaatactatgttaaataggagtgagtgagagaggacatccttgtcttgtgccagtttttaaagggagtgcttccaacttttgcccattcactatgatattggctgtgggtttgtcataaatagctcttattatttcgggktgtgttccaccgatacctagcttattcagtttttagcatggagggctgttgaattttgtcaaagaccttttctgcatctattgagataatcatgtggtttttgtcattggttctgtttatgtgatgggttacgtttattgatttgtgtatgttgaaccagccttgcatcccagggatgaaactgacttcattgtggtggataagctttttaatgtgttgctggattcagtttgccagtattttattgaggattttcgcatcgaagttcatcagggatattggcctgaaattttctttttttgttgttgttgtctctgccaggttttggtatcaggatgatgttggcctcataaaatgagttagggaggattctctctttttctgttgtttggaatagtttgagaaggcatggtaccagctcctctttgtacctctggtaaaattcagctgtgaatccatctggtcctggaccttttctcgttggtaggctattaattactgcctcaatttcagaacttgttatcagtctgttcagggatttgacttcttcctggtttagacttgggagggtgtatgtgtccaggaatttattcatttcttctagattttctagtttatttgcatagaggtgtttatagtattctctgatggtaatttgtatttctgtgggatcagtggtgatatcccctatatctttttttattacacatctatttgatcttctttcttttcttcgttattagtctggctcgtggtctagctattttgttgatcttttcagaaaaccagttcctggatttattgatttttttraagggtttttcgtgtctgtatgtccttcagttctgctctgatcttagttatctcttgtcttctgctagcttttgaatttgtttgttgttgcttctctagttcttttcattttgattttagggtatcaactttcgatctttcctgctttctcttgtgggcctttagtgctataaattttccactacacattgctttaaatgtgtcccagagattctggtacgttgtgtcttcattctcattggtttcaaagaacatctttatttctgccttcatttcattatttacccagtagtcattcaggagcaggttgttcagtttccctgtagttgtgctgatttgattgagtttcttaatcctgagttctagtatgattgcactgtggtctgagagactgtttgttatgatttcctttcttttgaatttgctgaggagagttttacttcaaattttgtggtcaattttaaaataagtgtgatgaggtgaaaagaagaatgcatattctgttgatttggggtggagagttccgtggatgtctcttaggtccactttttccagagctgagttcaagtcctgaatatccttgttaattttctgtctaattgatctgtctaatattgacagtggggtgttaaagtctcccacaattattatgtgggaatctaagtctctttgtaagtctctaagaacttgctttatgaatctgggtgctcctgtgttgggggcatatatatttagcatagttagctcttcttgttgcattgatccctttaccattatgtaatgcccttctttgtctcttttgatctttgttggtttaaagtctgttttatcagagactaggattgtaactcctgatttttttcgctttccatttgcttggtaaatattctccatccatttattttgagccgtgtgcatctttgcacatgagatgggtctcctgaatacagcacactgatgggtcttgactctatccaatttgccagtctgtgtcttttaattggagcatttagcccatttacatgtaaggttaatattgttatatgtgaatttgatcctgtcatgatgatagctggttattttgcccgttagttcatataatttcttcatagtgttgatggtctttacaatttggtatgtttttgcagtggctggtaccggttgttccttttcatgtttagtgcttccttcaggagctcttgtaaggcaggcctggtggtgacaaaatctctcagcatttgcttgtctgtaatggattttatttctccttcactatgaagcttagtttggcgggatgtgaaattccgggttgaaaattcttttctttaagaatgttgaatattgggccccactctcttctgacttgtagggtttctgcagagatatttactgttagtctgaggggcttcccttgtgagtaatctgacctttctctctggctgcccttaacattttttccttcatttcaaccttggtgagtctgacgattatgtcttggggttgctgttctcaagcagtatctttgtggtgttctctgtatttcctgaaattgaatgttagcctgtcttgctagattggggaagttctcctggataatatcctcaagagtgttttccaacttggttccattctcctcgtcactttcaggtacaccaatcagacatagatttggtcttttcacatagtcccatatttcttggaggctttgttagttcctttttattctttttttctctaatcttgtcttctcactttatttcattaagttgatcttcagtctctgacatccttttttctgcttgattgattcggctattgatacttgtgtatgcttcacaaagttctcgtgctgtgcttttcagctctatgaggtcatttatgttcttctctaaactgattattctagttagcaatttgtctaaccttttctcaaggttcttagcttccttgcattgggttagaacatgctcctttagcttggaggagtttgttattaccgaccttgtgaagcctacttctgtcacttcgtcaactcattctccaatcaattttgttcccttgctggcgaggaattatgatcctttggaggagaagagacattctggttttggaattttcaggctttttgcgctggtttctccccatctttatggatttatctacctttggtctttgatgttggtgaccttcagatggggtctttgagtggatgtgctattcctttctgtttgttagttttccttctaacagtctggcccctctgctgcaggtctgctgtagttttctggaggtccgctccagaccttgtttgcctgggtatcaccagcggagacagcagaccagcaaagattgctgcctgttccttcctctggaagcttcataccagaggggcaaccacgagatgccgctcagagctstcctgtatgaggtgtctgtcggcccctactgggaggtgtctcctagtcaggatacacgggggtcagggacccacttgaggaggcactctgtcccttatcagagcttcaacactgtgctgktagatctgctgttctcttcagagctgccaggtagggacatttaagtctgctgaagctgcgcccacagctgccctttcccccaggtgcttcgtcccagggaggtggggattttatctacaagtctctgactggggctgctgcctttttttcagagatgccctgctcaggaaggagaaatctggcagtctgaccacagtggccttgctgagctgcagtggactccacccagttcgaacttcttggtggctttgtttatactatgaggggaaaaccgcctactcaagcctcagcaatggcaggcaccccaccgcccccccccgccccccaccaagctggggcatctcaggtcaatctcagactactgctgtgctggctgcaagaatttcaagccaatggatctaagtttgctgggctccatgagggtgggacccactgaggcagaccacttggttccctggtttcagcacccctttccagaggagtgaatgattctgtctcacttgcgttccaggagccactggggtatggaaaaaaaaaaaaaaaaaaaactcctggagctagttcggtgtctgcccaaacagccatcttgttttgtgcttgaaacccggggccctggtggggttaggcgccagaggggatcccctggtctgtgggttgtgaagaccatgggaaaagcgcagtatctgagctggagtgcagggttcctcaggctcagtccctcacggcttcccttgggtagggaaagaaattccccgaccccttgcacttcccgggtgagatgacaccccaccctgcttcggctcgccctccatgggctgcacccactgtccaaccagtcccaatttgatgaaccatatacctcagttggaaatgcagaaatcacccaccttctgtgttgatctcgctgggagctgcagaccggagctgttcctattcagccatcttgccagcaatcccagctttgcayattttaagttcaatactcctttaaaattaagtggagatgttcactgggaggttgaatatgstactgtggactagaaataataatttccatagtctgaaagtcatcaacatttctggagctgaagccataggtttggaagaggctcctcagagtttttgtagagtgagaagaaggaatatcaaggatgaaggtaaaaccgttggcaacagcaatatttcagggcgagttaatattccagtatagatacatgcatctactccttttctgagtctccctccatttatggttctgttctagtcaagccccaggacaaaccgttgctctgtcacagctgtgcgcatccctggtctttggtccccaccattacaactgtttttccccacttgtcatgtgccgtttatctctttttctacccatcgtgtgattcctatctttatttttcattcattatttattttcattccattcctctctacccctcttttctttacccttctttacctatttctctctttatttcctttttcctccatatttcccatatttccttttttctttctctttttcttatgcctcacctctttttttttttttttttttttttgagatagggtctcgttctgttaccaggctgaagtgcaatggcacgatctgagctcactgcaacctccgcctcctgggttcaagcagttcttctgcctcagcctcccaagtagctgggaatataggctcacaccaccaagcccagctaatttttgtatttttagtagagacagggtttcaccatgttagccaggatggtcttgatctcctgacctcgtgatccccctgcctcagcctcccaaagtgctaggattacaggcatgagccactgcgcctggcctttcctggatgttcttcgtccattccccacctcaatgtgtatgtagatagcttatttttggcaccagtagtttgtactttttaaaaacatatgacccagtgtaagtcctaaggaacaataggcccttccatgcctggacatccaaactaaacattttgaagaggtttatttttaattccgggaatatggtggatatattttgtcatctggcaagttctctgtgaggaatagcctgcaactactaatccagttgcccttgtgaccctagctaaatgtcaactaatcctccaagggtctatttctgcaatattaattcatgattctacctgggtctctctggtagtcgttgaggttatgttataaattatgcattgaagagatgcctttggtaacacgtggccttaatgcaactttagactaaatgccaacaagtcatgtcagatttacatgattatttactagataataatcttaaaagggttgtcttcacagcatgtgccactttgggatttgctttttctgaaaaatagagtatattctctgtcagatgaattagccagtataccatgctcagaaatacaaaacttgctattatctttagacttgagcagtcttgtacaaactatcatattccatagaaattcttaaaacgtctaattgtccaggactttttaccaaatttcaagtctaaatttgaaaggtagtgtttttaagcagaaaagttaaagcataacattaatcatagaaaaattgttggggtgttattgataggtaatcaccacattgtttggttagaagaacactgaacttagatgtggaattcctagatctgtattttaactgactttgtgattctgaacttctctggccctagtttcctcttttgtaagttgagaaaactcaactagatgatctctgaagaccttctcaattccaaaatgtcaggtttcctggtaggtagyagccactggtgacactactacrcatttgctattctagaagtaccgcatgtgttttgttactgtgtttccctacttaaacctctgcagcagctcttccccaggctctctcagttcagttcaagcccagaggtgatggctgatgagtggtttatcttccagcnacatgttttcgaccttcacacaggaggccctcaattaaaagggaagccgtagggaaatggaaaaaggaatgagagagagggaaggaaaggaactgcctcgggtgtggatttcaatatattattagttgttactgtcagttagaagcaaatgctgtgaaactttgcactcattcctgtgtggactggttagcctatgtttcctctaccgcagcattctgagtcgtccacctcanatatgtgctgttggtcataaagacagactgggcccaagagacagtgtgggtgaaacaaattcattcattccttctagaaataaaatgggaagtctgtcctacagaggatgagccagccgccatcgtctgtacttgtcacatgccaggccagctcgcctgctagcttgggagcaggaggacagcaaattcaaacactggaaaattgcttgacattttattgggaggcattgtcaattattagctaagattgttttgtcttctgaagaattggccctctataaaaaaatagttgtggaaggtgggcttttaacagaaaatgtaaagtctgttcagttcatactaattagtacatggaattatttaacatataggcaataatggctaaaaactgacatgaccatcagctttattttaggatgttttacaaacctatcacaaagcaacaactaattttttgttcatgtatattaattcatttggcctttacctggactaatatcatctgaaaccttcttttctttgaaacattttatgaaatgtatacacttatttttactttattatgtaagcaaagcaattttttattttccgtsccacaaattatgtgttcctttaaagatttgacattttgatgcagcaaatgttaagaaaaggtgtgagataaatgtctacaaaataaatgttttatacagaaccacggggcaatgtactctcaaaattaatataaaataacttgaataggacatattttttttaccaggtttcatccatgtataattagatatatttgtataaatgaaaatacctgtatttttaacatttttcataaggaataatgtatctcaataacatgtttgacagaacttagtatgtaagcactatcaattttaccatgattaattatatttacgattgtttctaaaatagctatagatctttcaggaatttgagaacatttgtattaattatagtaatattcctgtctcagccactgtggtacatagaaatcacagaagttgcagctattgaaaataattaaagagttaggcattctggggcaaaatagcaagtggtagctattatattacataaatacctgttataggtaaatataactattttaattctgaaacactatacctccatctcctttccataacacatttaaacagatgtacattttgcaaatgcagcatattatcaaatatttggcacccattctattatatttaaacaatgctagcactaccaagaaaaatcacaataaaaatgggaagtttttctgaagacaacatgaaacaaaaaagataagagggaaaatttgatgaaagccccattttcaaagagatgcctgcagcatgcagccggaggcaagttgacattaactatagttcccccggcctatccatttacatgtgaggtagtttctttccactgtaagtaagtgtgacttctgtgtggaaaatagcttaggtctggatgcattattcaaagttttatttcaaaatcacctttcctgagactacactgagaaagtcacacatagatgtttctttgtgacaattatttaaaatatgtggctttaatatgcagtcctataagtatgaaccagatgctgagatcttgcctagcacatactttggcatgcttggaacaggccatatgtgcacacaaacatgtatggatgttttatctcagtctatcaattagctgccgtccttcaggtttccagataattgaatagggttgaggtacaagggtaagttgaacaaattgacttttgtaaaggcctcttctgagctggactttatatgattactgtaacagttcctaaagtaacccctatttcttgactsaacctaatgggaactctttttaaagaagattttattttaaaaaaagagtgtggggaacatagctaccaatttttcatcttataggaggaaagtgtcagagaatgataagagtcatggctttagaatctgacgaacctgattttacaccacaactctttactttgtggcactgtaaatttaaatgagttacttaacacctctgaactattttgcacatgtgagatgtgacgatgatgataatgtgtactgcataggggatgcggtaaaaattagatggtatatgtacatagttggtctttgatagataatagcttaagaacccagcagttggagaacttgtcccagggcacgtaggtagtccgtgggagggcctagtctaagtcagtgcatctgacttttaactgccctgctaccctggctcaggcaagtaaaactcaaacatgcaccttgctctgtaaagctcaggtactctttataattagctgacaacaccgtgcagtcatcagcttgttgcagtttaccattgctttaagtctataaatatttgaaattctgccagcatgtcttattcttttctttgagccatcattgcagaatagctaaataaatgctttttttcgtatcctcctttgcagaagcatttttagaattcttttgaatagctgtattttgtgtcatttgttgattcctgagtttacttctgataactctcaatggtgaggatgctgtatcctcttgtctggtttactgaacaagagaatcttgytaagttttagaggaagccataaagcaggggagcattagctgcacctttcctcctcagagacaaatgctggggtcttccgtggtgaaagtggagaccckggggacagctgccttatgcccacaccttggttccgtggcttactggctgtgtgaycttagacaagccacctagctcggtgtccctcagtttccccagctattccaagggcataataatagttcttacatcataaaatgttatgacaagaaaacaagttratacctttaaagtgctggccccagtaaatattaactctattgataatatgcattatacaccagtatacaagctgtagctgcctctctggtttcaatgctcatggcttgcgtgcctcgaagtctttgtgtccggacatgggagaagaccaaggaacggagctgtctccccttgagagggggtcctctctccttttcccatggagagcatcatttctttgtacccaaagaaacacacgggatgggtctttaattatgaagctagctaggaacacagctagctggaatgagacagctcattttctccttaccttaaggccatgccttggtgaaggtgccagagctgatagcacaaagtaaaatcattcttcagccatgctcagccactagtattccttatgcccaggctcctactcagtcaagtggagagccggattataggaaaaattgttctctgcagataagtaaaccaaaggtcctggggcatcaatactaccatgcttggggaacgtcctctaaaccccaaatgcttctgagtgggcatggcattggcattaaatgcaaatactttgggtattaaaaccttccagacccagacgcagcaaggtgccaagtggtctgccacctggggtgggaacagaaggacagcatcactgtcttcggtgtgcataaaggccttgtcatgtatctgtgtggactccctgagcctctcctcagtgctgcttgttcaccttccacagttgcaggaggtcgaaggccctgtggccaggcaccagccctgaacttgcaccacattcagcagggctgaattctcaccagccatctcagggcacaattttcctactgattcctcatttgaatgcctggtaactccactcatttttaacctctatctattagcatagcttattaaaactggttctrtctgtgtctcttaattcctaaactcaagccctagacttcttaaaagggtattgagagagggctgcataattactactaaaattgatcattcttcacagttgatgtctcaagatggagtgtgttgacattcccagtcccacccaagtgcttcatgatctttactgggtgtgtgttttgattcatgttgatgtgacttcactttctagttcataagagcgttaaaaactgagcatatttttcttgggatgatcgtttaaacttgtatcttggttatcgaatccaggaattcaaacctaataataccacttttccaactctttccagttttgttttatattaataagtaaaacaatgaagagtatgaggaaagaaatatatgcattaagaaaaaaatagtccaatttctaacctgacttatttgggcaatgtattagtccatttttgtgttactataaacgaatacctgagagtgggtaatttataaagaaaagaggtttaactggcttatggttctgcaggctttacaagcatggtgccagcatctgttcagcttctggtgaggcctcaggaagcttccaatcatggaggaaggcaaagcacaagcaggcgtgtcccatggcaagagcaggagcacgagagcgagygggagggtgtctcagactttgaaacaaccaaatttcatgtgaactgagtaggaactcactcaccaccaaagggatggtgttaaaccattcaaaagggatccatccctaccattcagacacctcccacccagcccacctccactgttggaaatcacattgcaacatgagatgtgggggacaaagatcctgcaaaccatgtcaagcaagattcatgacacctcttcttctaacataaatctaaatttctttttaacagggaaatggtttacctctggaatctttaatttagattcatttatagaaaattacataaaattaatttttaagaaggatacagaggcgccactgtgttgattgagaaaggaatattttggatggatctcagcattataagatgtagtattatattaagtactatattttcttgaatagtaatataaattttgcctggtatccttacagagtgtgctttttaaagtaaataaagcttcactggatcccctggaagatgttcttatcattgttatattcatatgtgccgtttgcttatggcactgctgtggtggaactaaagtgaaactgtttttatgagttttactgcaagtaaaaatggattcatttattaaatcccaacatactatttctttgtaaaaacaaaacaaaatttgacaaaactrtagtccatgttatcgtgtctaaagatggcccagtgttcattccggtgtttattatgtttctgtgatgacttaggcagcacctgcctgagtaccagaattccaatttggacacctgggatttagtgctttgcttactgtgtccctcccgacagtgccgacagtacgctctcctgcattcacagtcctgaatgatctgggtaccatatgtcttttctattagatcctttttaatcatcttcaacatcctattcttacatctagtctagtgttttccatagaagacatggagtataccgtcagtaaagaaaaatactcttctttcatgcaagccctttagtgcagcactggactttgaacagctttgctttttaaaaaaaaaatttcagggatgtaagtttcataatattataagatgttttaatttttctgtagtgtagatattataatggacagactccctacgtgtagtagtatgaatttgttaaagtttgaataataattatttgaattaaaaatttaatatattaaaatagttgaaatgaataggagtacctttaaattcagatacagcttaattcaaaagaaaaatgggctcatcactatcatttatttaaacgatcatttatttttaagccacctttgaaatattttttataaatcgkgtattccattgcatttttataaccaacatcaattgagattaacaagtcctttgttcaaaaaaacgaataaacctccttaagatgaaatttttttaagggaagtcagggagaactttattctttttatgtattttctatttatttatttattggagatagggacttgctctgttaaccaggctggagcacagtgacacaagctcgctgcagcctcaaactcctgggctcaagtgatcccccgtctcaacctcccaagtagctaggactgcagacatgcgccaccacgcccagaaaattttggggttttgttgttgttgttgttgtagagacagggtgttgccatgctgcccaggctgatcttgaactcagggcctcaagtgatcctcctgcgtaagcctcccaaagttctgggattacaggcactgaaccactatgcctagccaggatgaattcttcttatactgtgggcatcttaagttaaaatatctagtttttcaagtcttctattcagtggttttataacagaaatatctagacttccgtcttcagtggctaggctgcagcctagtaatttattcaggacttagcatttccaggcagctcttctcgctgttagctgtctcactgcatcattgtatggtattattcctccaagggtgtttgataagcatctgtgataaacattgattcattgttcccattgccagaaagaaagcattaattaataagaacaaattcaggaaaaggccgcttagtgtaagtgcctagttattgggagctatcaaaatgttctttgttctttatccttttacctgatttctataaaagcctgagttgtgggtttggagtcagtggtcagaatttgaagaaattggccactctctaaagatatgttcagctatcaatgactaattcttaggtttaacttttattaaaaaggaaaggaagaaaatctcagaaatatattaagatcttcaaaatgaagaggtgacatagcattcactgaaaatattaacttggaagctgtcatgcaggagtggtgttggctccttgggggacacttggggatgcctgagggtgtctttgctgagaattaccttattgtaattgcatctgttggttgcagttttgtagtcacaattgtcaagatttttctttaataatttgtcaggctaaggttgactctgagttcagatcctaaaggtcatagaagggttaaaatcataactgcctaggggggccagtagagttgacctgtgtatggatgagctcctggtgcagagagtgtggtgagaaggcacccactgtccagcttcagrcaagtatattacagtgtcacaaatcttcccatctcccctgagggaagggagaaatcttgatttctttactaagtgttctaactttttggttggcaatgaatcactttttaaagtatgtgttggccaaataaaatagatatccagtcacccgcatgtgattcttaattgtatttttaagataaaccaagcaggagacatttaaaaatcttctgtcacttacatgtctctggctacacatgttgtcttataccaaccaggaaaggacaacggatcatttcctggtcgtgctacccctttacccacgtgctcattcataccctgtgatgcatgcmaatggcaccactggcctgcatcctacttcgtgatarctggttcttgctcagaaatccaagagaacttaggcatcagttatcttgtaggtgatatggccagatggtttggaataagtgtgcctcccatttctaattagagctcatccctgtgttctgcactgggattgctgttgactcctgttatttcttgctaatccaagctggaattcctctggactcttgttgagcctcagatagcaatatctgttagaatactttttctcataagactacagttaaattttgtggggtttttttcttttttttttttttcctacggagtttcactcttgttgcccaagctggagtgcaatggcgccatctyggctcactacaacctctgcctcctgggttcaagcaattctcctgcctcagcctcctgagtatctaggattacaggcacatgccaccacgcccagctaattttttacatttttagtacaaacagggtttcaccatgttagccaggctggccttgaactcctgacctcaggtgatccgcccaccttggcttcccaaagtgctgggattatgggcatgagctaccgcgcctggcctaaattaaattttgtaaattctgtttacatgaatggtctttctggactttgaaaacaactccgccagtgtaggaaagaggaatgggtggccctggctgtgcccacttctgcagatggttcccaggagggaagccagcccaccccagcatggctcctcaccctgagcactgagtgctggggaccacccgctacctcctcaacacaggtgaccaagkccggagacccagagatmatctaagaacaaggctgttgctaacacgtggctgatgatttctttatgtacccttttatgccgggtttgaggagtaagatttatctgagaataagtacatagcatatttccctatgtatccattcctctctccaccccatacacacatctttacgtgtgtttcaggaggtggggagggaataaaaatttaaacagtctccagggccctgaagtttctaaactgctaagtgtccaatccacagcctggcgagctgatgtggtcttggcatcaggctgcagttgtaaaaatgctctgctgcttctccaaacaaacactggagccctcagggcacatctaacagagccagccgtcagccacacacctgccctcagccagctctagcgccttcctgcaaccagtgtccacacgccccacgacagctagctcccaaggactgagccaatccactttcactccttggcaggcaattgctcaagtgcctgagctgaacaggcttagcttcaggatcagtttaattttctgctgtcctaattgctgtgctggtgcctggacttaaacaacctattcatttgaatctccaaacaacttcctattcatttgaatctccaaacaacttctaactcatgttccaaaacttcctaacttctaaagttgtgattttttttttaacctggaactttcaggatgctagcctgattttctaaattttgcctgactctagattaagtctagcttgtcgaatgttcttcaagaaacacactcrccattcctcagcttgccagtggtgaggtccagtctctttcaccgtataattagcgggaagtgtcccctgccctmcttagccaatacccaggctgttagccatgtctctcaagggaagtctgccaagcacagaggacaatattttaccaaaggaacacagcataaataaatgttcttatcctgtgtacctttttcacttttatgatcaacactgatataaagaacaacaatagcattaaaattaactgaagttatgagtacctaagtagaatgataattcattatgtgaagagggtggttgattaatgagcaccattaacaagttcatagtttcagtggtcaaaattacagatctgattatgtgcagtgtaacatgctccattgattttcaagtactttttcctaacaccaacaattatttaaataccatgtgttctatgacttacacaattttgagttctcaaaaacatctttaattactatcctgaccactgtgttagctttagcactttttagttaaatcgaggacactagcaatcatttctctttcagatgttatactgctaattttagtgataatacgtgaagaacttgcaaccattaaaccagagctgtgtgcaagtaacaatctagttaagccagggtaaatgaaatagccattatgaaagatccataagttaagagagcaactaagaagaatagaagaaaagaaatcgagttttagattctaaaatgttgtttagtatcataagttgacctcactggatgagactgtgttagccaagaagtctcttgcttagttaattttgtgatttggcaaatacagtctgtaaaacatttttctttaacagcatgcagtccctttttaagtgtgcattcagtgaaaaaggttctatgctgggacccaaaaatgcagccctaccgccattatttacaaaaatatatttctaggtatatgtccaaaagaaatgaaaacagggactcaaacaaatatttgtatacctctgttcatgcagtattattcatgatagctgaaagttagaagcaaccaagtgtcctttgacagaagagtggataaacaaaaatgtggtctatccatacaayggagtactattcagtcttaaaaaggaaggaaatcctgacacatgctacaacatggatcagccttgaggacatcatgctacatgaaataagccagtcacaggaagacaaatactgtatcattccacttatataagtacctagagtagtcaaattcatagagacagaaagtagtatggtagctgccaggggcttggggaagaaggcaatgaggaattgatgtttaatggctagagagtttcagtttgagatgaaaaattagcgagacagacagtggtgatagttgcacaactatgtgcatgactcaatgccactgaattatacacttaaaaatagttaaaatggtaaattttaagttatatattttattacaataaatatcttctaaggccaggcgcagtggcacatgcctgtaatcccagcactttgggaggccaaggtgggcggatcactaggtcaaaagaccgaaaccatcctggccatcctggttgagtggaaaccccgtctccactaaaaatacaaaaattagctgagtacggtggcacacacctgtaatcccagctactcgggaggctgaggcaggagaattgcttgaacccaggaggcagaggttgcagtaagcggagatcacgccactgcactcctgcgtggtgacagagcaagactccatctcaaaaaaaaaaaaaaaagaaagaaagaaagaaatgttctaatactggtagagtgatttagacaggttttgaattcttggcaccgctcatcattctaatcaatggtcagcctctgagcattggagcactcagtggtacttgtacacttggcttgtcatcaagtgtttcccttttagactgttaggccaaggatggctaagaaagttactgtccagccgatagcaagagaatatttatgttgttggtacatgtctaccagagaccacagaaatgcacaaagctacatttgaagcatgtcaccggcagtattccagcattattactgacagtggtgacagtgagaaaaccaaactgccttgaaaaaacacctcctgaattgttaccacaataccccagagttaggcagcgtgtaccgccaaaacactggtgatgcccagattcttgcagtctcaagtgaagaaagcaatatgttctgctgcattatttttaggcaccagagagtgaaatatgggtagtgtcaggccagtcgcttccatggctatcaatttttgatcttctttactagtaacagtgagggtggcacaaattatccatggacagaataggaatgtgcccagcattctggaagcttatagtgcttcaaatcaaatccacacagctccccacgtgcagaattgtgcagttccccccttatgggcttgatttttttwaaatgtaagaaaagatattcagcatttgctacctaacacttagggctcgggtccctctcagttgaatgaagctctaattatgcatcttgacttattctgtagtttctaagtagcctttccattcagggtattcttgtggctgtctgtgaactagaaactcacagagggcaggagccatggcttgatcatgtttgtctctcccattcctaaagcagactaagcacatgataaatgtttattgatccactgcagaaatgagtgaataaacgcagatcctatctatgggagtgccttggtgccttgcctactgtgtggtttctcctcccagctctgagaagtggcttggcggactccaacctatgcgctttacgtcattactgaggcaaggaacaagtcatactcttgcttcccacttctccctgcaacccgctttccctgggctgcagcctcttttctgtaattgaagtcaccttgaagaagaccatgcccagagcatagaattttgcctctctccccatgtgaggaccatatatgtttatatttattatgtgtgacatctgtaaggaacctattacagagcccttccttccttcaaacaagtttattaaccagcagagataataatgaccaaatgaaaaataaaagccagatttaccttgcataatctaaattaataataacacatccatgaacaaatgtcttgccacttgtattatttattacttatttggtgatgatgatgacagctaatatatattaagtgttaagcatctgcctcttactaagccctgctgtaagctttttacgagtattatcactgtttcgctttgtaatgactctgtagcacatattctgttgtcctgttttacactcaaggaaaccaagactgagcaaactaagttgcttaaagttgcatggtcagtaagcaactgaaccaaggggtaaagccaggctgctggtctccagagcttccactctgagccattatgatactttggttgaaataaaatagacctaggcaaagatagacacaagatctacctgttgagctggaaagaaagcagctgaaaattctgtgacttgaattattatgatactcatatctctcccttcacccagttaataaaagaagcaccctgcaaagccaagtgtgcaggctctaagctactcttggacrcaggctctgctcacttaaggtcaggaagcagagaggagacctgggtgcctctggctcctttggaagctcctttagcatatgaagcatctaagtaggcttgaaatatgccacaaatgaatggtcatcttcacgcaccaatagttttcaagcctccatggtatgtgtgcatgttgtaaaatccacattggtgcagcagcctgtcttacccacatgcggtgactctttccctcctcctatctggtaccacatggcattaggccagagactcccacaaacaaagcctgttgttgctttgtgtacacttcattgtcacaggggaccaggctccacacttctcagcatcactcttagtggtttggctcaccttggtgactcaggagtcacagttaacatcatttccaacccacagcaaagactgggacttgaaatttcttctgtgttcttattacttcttccattgtcacttgttagattctgagagaagcaaataaggctgcccgtctgtggatggagcaggctccagcgcccttttcattgtagttgtacctctgaggactaatgaggagtcacttgcttgtgttcttggaagcatctgtggtccaaaggcaggaattctcaactctggactgaaaagatgccatgcagcaggaggaattgcactttagcaagtgaaatattgtgggcttgtgaacccttccttcagaaacagacacggttagtatgtggctctgatatgggagcagttggtgaagatgaatgtgatacagcagttcctgttctttgcccctgatgatgcagtgtggcacctgatgctgagataagtattatcttccagcgatgtcgcgaagtggcatgttaagcctttatggtgatttgttgcaccttgccattttggctggcattagagctctaaactcattttcttcccagctttctgcccttgcttgtgtattcccagtggtatttctcattagcattatcttctgttaagcaggaaatggtctctgcttctcaaccctggacaatgctgagtatgtttctagcgctcagttaaaaatatttactggcattagtatgccttttttcatgtatttcaatattattttactttacgacagtattagtattagtctgaaaagtagttcctgaaagttgttaagtatttttacataaatttgacaaggacgtattttcatttttaatcacagctaatcttagttttataccaaaccatttggttttcacattaaaccttgcagctccagaccactttatagccaaaccaagtaataggaaactggcagggccttataacatcgtttgtaattgttacaaaatatgctttgaaatatcatcataaatatgtaaaattaaagttagcaaaaataagtgtatagactacatttggagcctgtgatacccctgattttaatttttttctctctctcactagcaaatttgctaaatttgttaatttgtagactgtttcttcttaatttgtgagaaaaataagttagttccatattcacttttcttaaaataactgttttctaaagttctgtttataagtggaatcaacactaaattatttgtgttactagaggagaaaagagatccaactaaaacaatagataatcacaaattgtttagatactaaaaaagtgctgaattttgtggaacaaagctgatttatggaccatctactcctttcttactataaattgtatggagcaggatttaaccatctcaaacctacatagtgacaagtatctttgcaatggaatgcccctcactgggccttatcatggtgtgttcacacctttacttatagcacagactccatgccatggtagatagtttatgaagacgagtttttgctcacccataatccagattcactataatattatgcatgtaagttctgcctagactcaatggaagaagttaaattaaatatattgccttcctgtttgactttggaattaaatttctctataaatatcttatcacgctcctaggagatagtttccttagataaagaaatcttgtgagtgaaaggaaggaaaatgaaggtggaaaaggataaatgtcatcgatatagcacaatgagaaacaccacacctagcaagaagagacccgagtcctattttctccaaccattgtatattcattttctttctcttccgctcgaaaagtgaatttaaaaggtcctatagcagtatatcacagacacatgttaacaaatggctgcccaaaaagttacatcttcaaaaataccatgttgatttgggcaaaaaaaaaaaaaatgcttatcaaattagtaagacaaaaccttttgctttttgtggcagcagttgtgggggtgaaggaaaataaaaataatawgtctaaaagtaataggtctacttcccctgttgccgagtacactctctgaacacttcataaagtgtacctccatgtagccttttcagatagcagtgatttagacatagaaacaacattatcagtaacaaggaagaaaaaaaccttaattgtctaattgatggctattatgagattccgtataattcatggaattggtaagaatttcacccaaggcaagaatttagcatggtgtatgcgtgtacttttatttagtcttcaggaatcacatggattgattgctgatgagactattttttaactaccaagcatatatattcatatatgctcaatggatacaaattttccaagatgttatttttttcttaatgttgggtccattttttcttctgtaagtactcatttctgaaacaacagtgtaagtaatttggaaacatgatttagtatgcaagtattcactttacactcctgtcttttggaatgcatttgatgcacatatttgttcaaactaaataaggcaaagaatttaaagagctagaaagagtcttggagttcatctcttgctaacctctcattttatagatgaaaaaacagaaacccagataggttcgatgcttctgttgggtgaggggaaaacccacagctgtgaatcctaatttacagtttctgcacacatttctttaatgtgacttttttgatgactgcttaacagagtgatgtcagctatgctaaagtcctgacatgtcagtgacaatacaaggaccacacgatgaatttgaggatatctgtatttttctggtacagctaggtgggctcttttaagacagaagtcttaatctgtgagagcctcccgaaatctagagaaagttctcagccaagaaaaggtcccggtgtgattgatggctgtgctggccgcacagttatagtcagttacagtccttgctccttcaaactatcaagcagtaaatttgtaaatgagctgagcgtttgttgttattaaagcttcattttaccattctctctgtgcaacaagcacttaacattgtacttgctcaagggttaaaaaaaaaaaaaaaagcatccctaaattatatataggtagtcttgggcctataggtaatctctttggggcttttaaaagaaatatacaaagattttcctacctttctgtgtattcttacaaataaatgttaagactcatggcctggggaaggaggagaaactcattaagggagcaaattgcagggagattcctgaagaatcagtctctgagccagtccaggcactttaattttgtctggccctggcattattattgtaactgagtagaaggccatgagatcatagcctctccatagctcccgatagccatcaaaggtgactggcttctattacttttgaagtgacaaccacatttgaagatggtatagactgaccactgattgtcaaaactagtccaaaataaaaccattcatccatacttacttctgccacataacttgcagatgccctgcagcaaaaataaattagctctaaattttctgttgagcacagtcttccgatggggcctctgtgtgaatgttcttcagtcattttgctgagggctaagagatgagggtaagacccttgggctataggagtagctaaaaactgaaatattcccaaggaaagattctacattagattcatggataattaaggcaaaacacaaatctcattcattctggacctaaataaccttttcctgctagagaactttttttaaaaagttgcagtgtttactgtctgaggaaggcttataaaggttatgcttcttgcatccagaatgtgcagaaattctacagctataaatgtctcagcagcaaatgggctgtgtggcatgctacagccacagcctgctaggtaatttacgttgctcagggactgtagtttttcaatagattgaactgttagttttcaggaggatttaatgaaatattgaaccagatgccactggtctgccatagatgtgggactatgagaaatgaggaaatgtcactctgtaaacagcttggacctctgtgagtaggggaaaaaattgtgtccttagtgaaagagaatcacaaccaagagaaaacatggcagtttgggggtaaatgtgtttgtttctatgtccatgtcctgtgttcatttaaaatgggaggctgggtctaggacggagatccagaaaaattgtctgaatctggagaaagctaaatagaggctgagatttttccgagtctttcttgttgtccagtggtaatcctctgaatggccctatacagatgctcctggacttttgataggattatggtccagtcaacccatcataagtaagaaatgcagttattgcacctaccctacccaacttcataggttagcctagcctcccttaaatgtgctcagaacacttaggttagcctaagtgttggggaaaatcatctaacacaaaacctattttataataaagtgtggaatatctcatttaacttattgaatactgtgccgaaagtgaaaaacagaatggttgtatggatactcgaagtacagtttctactgaatgcggatagctttagcaccattgtaaagtcggaaaatcataagtcagggaccgtctacaattgcttttgctgtattctcgttttcagcaatataaagacatacccgatactgagcagtttacaaaagaaagaggtttaatggactcacagttcyacgtggctggggaggcctcacaattayggcggaagstgagaaaggtggcaaagatacagataaagcactgttcctgaataacatttcaagtcttgaccttttttttttttttttttataactttacagacttacctattccctgcaactcattcagggtatrgatgatcttgttttatggtcttgctgcaattcatagcctgttagtagctgtgtcttcaatgtactgggaaatttatctttgtacaggaaggcactgtttcaagacccagagctgtgttcctcaatagtccaaggaacctgtctcagaatcatccgggtacttacaacagtgcatacttctttgtcataccccaggcatattgaatcagaatgcaggatggaggaatctatacaagttcccccagtgatagggatcctcactgatgtttaacaaccactgctccagaggggtgggccagctgccgacatttcttgtgtcctaattgtgaggaaggttcttaaccatagaatgttaatgtaaacacaagaaaaaaaaaaagaaaaaaaaaacttctgcttaacctcagcccatttgaagcagaaagaaaattgcagggaaacccaaatctgtggtcctgattctgctgttgctttaagatcatctcaccagcaaacaccatggtttggtctcgaaagggtcccagatgaactaactcacctggcactgtaattaattgtaccagagtatgatgatgcatgaaacaatgttcactgtgtgtatgtatgtatatctacttacatatacacacaaacacatatgtttttcttgtgcttatttaagttttcatctttcttaataaggaactgtactcagttcagggattaggagtggtagagagacatattgattcattcaaagaatacttgagatgactacttactcaaagccctaagctaggtgccgagtattatagtctaagtggaaccattaaccatgtacctagacaattttagattgaaaatgataaaacaccataggatgtgtgggtaaaggcttcacaagctcagagggaaaactggctttcagttggaagaatttggcaagaaggtggtggcaattatgttgaaattttcagatataatggtaatgatatatatgctgttggaacaagtattagcatatgaatgattattattttcacaatatttcttaacacytggtaaaaccagcagagcatctattttgctgtgttagaatcgggccagggtcagacaaataatatgagtcaatttataaaacaaataaaagattaaatatgactttggaagtaaactcgtaactgcccagtgggttcttgctgcctgctgcacagataaaaccaattcactgagactgtggcattgcaataaagaaagagcacaattgacacgaggtcggctatgccatgtaggagacagagttattattcaaatcaatctctccaaacatttagaggctggggtgtttcaagaatagcttggcaggccagagagtctgcttctgggtagggccacaggatctgttggtgggtctgtgtggggcatgggttgccagcaatgcaaaaacttcaaaagacatctcaaaaggccaatcttaggatggatgtggtggctcacccctgtaatcccagcactctgggaggccgaggtgggtggatcacttgaggtcaggagttcaagaccagcctggccaacatggcaaaaccccatctctattaaaaatacagaagttagcctgtgtggtggtgtcgcccataatcccagctactctggaagctgaggcaggagaatctcttgacctgggaagcagaggttgcagtgagctgagatcacgccactgcactccagtctgrgcaacagagcgagactctgtctcaaaaaaaaaaaaaaggccaatcttagattttacaatagtggtgttatccacaggagtaaagggaagttgcaaatcttgtcacctccagaataatggctggtaaccattttcctttacactttagcagaattctggctcttcatccccctaacctggtggtctttcattagctttacaaaggtggtttagttttggggaagggttattatcatttaaactataaaagaaatgtctcccaaagttagcttggcctaagtctaggaataattaaggacagtttacagcttaaaggcaatatgggggttggttagctaagatctctttcactgtcatagtttcctcactgttataatttttgcaaaggcagtttaaaaccaaaagatcagagcaaagacatatgggtttgaggttttacaatgtaagaattgtaatatattatagttgatttgatgaaagaattatcaaccaagcagtataagcwcaatactgaccaagtgtggaggattattgagctcagaaatagtcatgcagtaagaggcgagggaartctatagggaaagtgcaatttgctgtmtcttattaaaataaaaatatgccttgctacctgagtaagaatgcacatactttttttaaaaaaaatctttgtcatatgactgcctattactgtttgaatcataacctccattgctgctttcattcaaaagaagccattaaattcacagacttcctgcatgtgcccagtgtgtgaaagctttaattaaatctacaagtagagccttaaaagaacaagaatcaaattaattgcaacatggtccacgcatttgtctctctgacagtccctgtgctttggagaaaaggcaatctgtgcactcttatctgaattagtaaactcaatatcactttccattagcatggccagttgctgccatgtgtcttctggctgacactgtttacatgctaatgccctcacaaatagagtctgttccaactggtttgctataggattctggagcactaaatccaggaggtggaatatgctgtcttctgctttctgcatcactggcttttgtgagttctctagattgagcttcgtaattagactgcagactaattaaggaaaattcaccacatgcaaatagagcaaaaggatttgctgctaattatggttcttatgccatagtcaagacaaattaatttgtaatattattattcaactttttggtggcctgcaatagtgtaaaataaggaagtgatgtttgtgcttaaggaagacttctacaactggagtgaataaatattcaccccatgaggaaattagaggtaaaatctgtatatttgaggttttagacaaaaaagactccacaattcctatataagcttcagtgtataattactttgtttttatttttgttttatatccagaaggtactgtttcttaatatgtcaatgctataatataatcacacyggcaatctagaaatacctacttcccaactttcagcatttaaatgggagtttaattcaacagtgtatgattttcttgtttttaaaggcttcacctatgaatcccttaggccaaatgtttaaagctaatgaactgtagctcgttatattctgcttatatgagggaaatagcctgaagcagggtggcctggcttagtgtgctgagtccagtaggcatcttgaaggtaatttcgttggttgcacatagtttagaattataacaaggatttctgccttgaaacattacgtattttagcgtgagaattgtctcaccggcagagaattaggttttcttgctgaaaatgtaaagcagatttatttatgaactgtctgccccatgctgctgttttctgacttgcttctcattccttagacgctgaagcctaaagaacaagcatgtgctcttcttatgactaaaaagtggttcagaaagcagcattttaagagttaaaggctttgcattgctaactgagagaagcagtattcacaaagtattaaaaattaaagatttagtccatctaatgtcaaattgggaaatttaaaaatttatgagcttatattgttaatagtttcctgagggaaaattcatccagtatttggagcgattaatgaattgcttgttgtatggcagtataatagagagagagagagagagagagtacagttagacataatatcgaagttatttttggaaacaagctaacaaagaaggctgtgtaatctctatctactgcaatctcaaaaaataggccgaatagccatctattgccagtgatttcagagggatgtgcctgaaggcagggagttggatctggtgacttcttaagtcctttccacatctctcattcccttaattattcatcaaatataaacacagacaatgtgattttctttattcacaatgtccctgtgtgaaaaaatatatgtatacatatgtaggattcagtactccttttatagaacattgctgtcaactattaagcttaacccaaaagaaagttctctgttaataagagaaccaaagtgcacatcatccccaacaggatggcaatttatgatgtattttgatcgtccacatgacttgcaggagagtctggaagaaaggtcatgggaagattaactgcaggcgcacccggttggtactgaagcaggattttgctctgattagcaaagcactgaaggccagtcagggaaaaagatcaaggtcagtgaccttccagaagggaagtcaacctcggcaataataaaggctgccactctgtcaggactccagtctcatgcagagttggtgactaacatccttcactctagcttgaaagccctgttgacagtttagttctaattatttgtggatcagattgagcagaaatacatctgcttcttttctatcttgtcttttgaccctccttttttctgcccttttaaaaaatgtgcactgatttctcaattatgtttttacttttttcatatttcttctgtcaaccccattttctcctgcctttctgaggggatgtgttttcttattacttgttcaaatactgatgccttttggaaaaagctaaatgacttaagtattttttaacctttataaaagtatgagaagcatattcttagaatcacagtgtacactttctcagccaaccattcaaccaataaagtaagtagtttctttagtaattctttgcagtttccacacctctttgtttattcattcaacacattttttgagaacctactgttaaaataaaaactttagacaaattaaatttagcagagtttaattgagcaaagaatgattcacaaatctggcagccctcagaaccagaagaggttcacagagttccccttcacaatgcgagacagaaggcaggtacagaaaggctgggctggttacagcagtgtttcccttatttgaaagtgatctgattagttggttcctgtgattgacggaagctcagctgctgtgattggctaaggcttgttatacttgttacaaaagtatactcctcttagcagcagcaaatcagtaagtgttgggagcaacctcaattcttgcctcctcagaagaaagaattcaacccaggggcataaggctgagtgagagaatgaggcaagttttagagcaggaatgaaagtttattgaaaagctttggagcagggaggaaagtaaatagagtacatttggaaaagggccaagtaggcaacttgagagggtcaagtgcacggtttgaccttagatctggggttgtacatattggcatgcttccagggtcttgtgtctcttctcccctgattcttcccttgggatgagctgtttgtatgcacagtggcctaccagcactggggaggggctgtattcacagtgtgtttactggagttgtgcacatgctcacttaagacatttttcccttagcagttgaacaattctagaaggtcatataccagttaaactctgccactttgcctcttagtgtgcatgcttgagcccacttgccccactcctgagatcttattgggaagctgctgatcaccagtttcagatgttgggtgcatggagttgctagccgattctagtatgtgcctagaattagaatattaatccaaatttttacattacccaccctctcgtttcttctgagctatagccagagatcattggtttgttcacaggaataagcaaggttagtctaaattgcagacaaaaactcaaaaagaactgatgagactagaatcttttaacaggtttgccrtcattcttgaaacacaatttttctccctccaatctccattttcattaaaaacaaatcatgataggactgatttgtttgcaaaataagctttagtcttgttatacttggcctgattatttgcataaatcacagcaagaataattatttgccacataggctccttttaaaattggctttgatgggctgggcacggtggctcatgcctgtagtctcagcactttgggaggccgaggcaggtggatgaactgaggtcaggagtttgagaccagcctggccaacatggtgaaacctcgtctctactaaaaatacaaaaaaaactagctgggcatggtggtatgtgcctgtaatcccagctactcgggaagctaagacaggagaatcactagaacctgggaggtggaggttgcagtgagccaagatcgcatcactgccctccagcctgggcaacagatcaagactccgtctcaaaaataataataataataaaataaaaaataaaaaataaatttggctttgatggaactttgttccattaggatctcagataaaatgttttaaagccataagcctagctgtgggtttgtaccatcaaatacctgtatgagttgggtacattcctcacctcttaaggtcccaagataacttggtgctcctaggcctgtgagaaagtgatattctttacttaccacaggtcaggaacactgtacagggactgcgtacagaaggtatgaggccagctttcccaagggacttttattatctctataagtcagatttgattccttaaaggaaagcatgccattccattcaaagccttggtaaaacaaccagtttctccaattgtgtcctgctgcgaaagaaggcagattattactgcacttatgcaaataatgtaagttaactttttcttgccacaagttaagaatacacaaaaatagtttccaaattctggagaaatcaggtacagagaaacaaatatgctccaaattttgtttgtaggaatatactttactcaattgttaaaagctctaaatggaaggattatttcagtcttctattagttcagtccatacatttaactcctgttctacttgatattcatgacacaccattcttggactttctgacttgtcctaaatatccctcttttttttttttcttttcttttttttttttagatggcgccttgctctgtcaccagactggagtgtagtggtgcaatctcagctcactgcaacctccgcctcccaggttcaagcaattctcctgcctcagtctcccaggtagctgggactacaggcatgagccaccacacccagctaatttttgtaattttagtagagaacaggtttcaccatgttggccaggatggtcttgatctcttgacctcgtgatcttcccacctcagcttcctaaagtgctgggattacaggcatgagccactgtgcccggcctaaatatccctctttttaaacaaccagtcattttactttaggacaacaatttaccatacaagatcctttctcatataaaatctattttctttataaccttccttaccaaaaatacctctttacctttataacctttgaattagacaacagtcattttccttctattaggaagtgatggtttgtactacatgttgctgtgtgagtcctgtgtagggaaagcaaatgtggaggttatctacgtactgtgactgctaatgtgagccacccgttggggtgacctgaaaaatcagcttggaagagcagaaccacagtggccaagaggaattgttctaggggttgattagtaagcaggagagtgaaagggaggggaaaaaaaacatgtatggaggttgaacacctgcagccaaagaaggcaaggtgtagaggtgtcttaccactggggaatgtatcagagtcatgtggcatcaaagtatattaccactagagaatatatccaagtcatgcagcaccaaagtttgttagaagtagcaaatctgtaaggatctgcagcaacctcagttcttgcctcctcagaagaaagaatttgaccaaggagcataagacagagggagtgactgtggcaacttttagagcaccagtgaaagtttattaaaaagctttagagcagaaacaaaaggaaatagagtacacttggaaaagggtcaagcgggcaacttgagagagtcaagtgcatgttttgacctttgacttggggttttatacattggcatgcttccaggtcttgcattacttctccctgattcttcccttggggtgggctgttcgaatgcgcagtggcctgccggcacttgggaggggctgcatgtacactgtgtttatgggagttgtatgcatgctcacctgagctttcttcccttaccrgttcattattcctagaggaaggtcatataccagttaaactccaccattttgcctcttagtgcacatgcttgagcccacttgcccaaatcctgagatcttattaggaagctgctgatcaccagtttcaggttttttctgtctactgggagactgccattcccatgtgccacctatgaccaattattattttagtgagacatttaactacttcctgaccatcacctgatggtcgactgatgttcttagtttgatggcgggtgggggggccctctcctgccctacttgtgtctgactagctacctactgtgacactcctgagttaggctttcagttaatttactgctaagttcagttgcagttggttaggaaaggactcaagtatggaggcatactcaagccaaatttagtttagttaactacatgtccgacactgttctagacattgcagatatagccatgaacaaaacaaacagaaatctttgcccttctggagatttgaaagctatgtcagatgttttactctgagcgatcatcaaggaggaaaaagtgagaattgagagtgattccatctttctccaagtgtaccccgtcttttttattttgggtaatgttggttaaattaacacagtctgctaaaaccaggccatagaaagcgtggcaattgctggaggcaacttctgaggagcccacttcggtgggcagagtggcttctgctgagcctatcacagarggcggcgacctctgcggatcacgcacatcagagcctcactggaagcctgtgttcctctggaagtagacgagctatccatcctgagactgaggggcgaaaaaggaaatgagcctgaaccagactccacggaccaaacaaatgaccaagtgccagaaagccttctgtcttgggcaactgtacttctgccggagttaatagcattttctgctgcttgtgcatcttagaagagtaaaatcgttttgtgaactatttccacccatgacttctcatgacactcagttgaatcagacaagctgagggtctctgagggaagatgaatccgcatcaggctttccccagcttaacagttcagaacccacttttccttcatcrgtgctggcagtgttgcaaagataattctcagctcttgagccctttaaaatatttagctttttaatacgtgaaaaaaaraaaataccttaaaaaagaaaaagtggaactcaaaggaaaccccttcttttaaatataatggttcaattttaagatgaagatgagtagcatttgttgggggtctttaattacgctggtctgtggcttaccttargagctagctgcctttgatgctttcagttcttattctaatttaactatttttttcctatgccattattgtaccatgaaaggaaactccctcataaacccatcatattgttcactgtagagaagcagcgtgtgaatatgtttatagttgctgaatatattcaaaaatgtcttttttatatgattatggtcctgaatgtttatttttatttattttattttattttttactttagcttcagagggtacgtgtgcaggtttgttacttgggtatattgcatgatgctgaggtttgggcttctagtaatcccatcatccaagtggcaaacatagtatccaataggtggtttttcagcccttgctccacaccctccctcctcaagactctcgtatatctcatgtattttgaaataatggagacattacgcaagctaaacttgagttcattttaaatattttaagctaaagtgacctgtcatgaatgtcacactagtgatagtacccttttctcttgcacttatttgttgctaagctgacttccaaatcggaattacctaaaggacttttcagatatatagatgtctagcccacactttgaattgcccaaatagagaataaccaggaatctttatttttagaaagcatcatagttcctacttggggaccactattgtactctactcaaaaatacatactgcagctgtaaaatcactatgattaaattataactttgatcgctttcttgtctttggaaaactaatacatgtttattataaaatcttgactcatagcagaaaagtgccaagaaaaaagtaaaataatctatcatctttccctgcccccaagtgctgtgactgctctgatgaccctcttttcgtatagcactgtgagtgtgcacgggtatgcatctgtcagtctgtctccctgttggagggagaacagtgctctatgtgcgtttcatagcccattgtttttcgcgcagtgtgtcacaaatcttgccacaccaagagttgtatttaacgatgtactgttaataatccccccagactcagctacagttaaggttgtagtcacacagcacttataattagataagtttacttttgtttcaaaactttctttgttttcattgtaagtcatggacttcctcgtttccaaaacctaaacaaaataaaccatagcttctaaatggatttagacattaaaagccttctcaagtatgtcacttttttttcttgattaaaaatatttaactcttacaagttrtttaaatatggctaaattctgttatggctaaaatcctaattttttattttatttccaaagatttgatgctgtgactttcttatcagaatcaccattgttgctcataatataatcaatcgggagagacaaaaaagaggcaggaaagcggtgaacttgtgatgcgatgacataaaggaagagaagctaatgctgtgttgtttgtcctgcaatatctgcttcattttgctttcagcagaggtttcctggctgctttttcctcctttctttgcccttctcctccttcgttcattctccaggagcctcgtacggaatctcattcatcctcagcaggaatatatgtattgagtcacattccaggcaccgtgttaaccaatgggaggaataaaatagttaaccaatgggaggaataaaataaagtaggaggaataaaatggaataatcaatgggaggaatgaaatagtcaaagttgccaccctcatgaagctgtcagttttggggagactaaaaataaacaggtagacaaagggtattatgtggtgtttacatcctcaacctcagaggtgatttgtcccaagtctaggtggaaccggcctgccacttgggccccaggctgtctccagctcaggaaatctgacatggggcacaggtggccaattctggcccatgagtagaagtccactctgggtctgtgaaggatgacttagacttctgtgttctatccctgtctttatgctgatctcccaagatactggaatgaccaggcaaccactttgaacttgaatttccctgtactgcatcctcttcctcatcccaaagttcctgcccaggtccacacccacactgccaccctaaccagaagatcttctgtcccacctgctccctccgtttctttgcacagacacagtattcaagcaggcaagttcatggcctgccctgctgaagtggacaatctttggtcttgagctccagcattttgccattctggagcacgaataaatctgtttcaagtttatttcatcttctctgtttcactgattggtttgatgtgttttatcctgctgcaactaatgtaaaaggaaagggatgtgctgtttttgaaagtcagagggtaaagtcccactgactttaatgataagtccattaaaaagatctgtcctgagagtcttggataccctgtcctctgtgccttcagaggagacgagtgagatgagtgaggttgcacagaccccactggactgttgggtggagaagagaaggggagcctcggcccgagcccatatcataggctgaaacatagatgtaatgctaagaacaagtgacgaaggtttaatgacttattttactttaatatataccaagaagctaaggaagacaatttgccctaatctataacactggcctaaagctgaacaaatgcctatgctgaacaaatatcatttttaggaaaaagttatatgaggatttgccctatgtatttaggatttatttttgatgtttaaccttttttagatttttttcagttcttaaatttttaaaagttgtcacctaccacatgagtgttagtaaagagtgctgagtgagagcgtccctttgtcctagtcctctggtcctaggtccaggctagcctcacagatagcagttgcccaggtaagacacctgaaagggtcttgccacgggccttgaattctaatgcagactttcaaaggataccactttctttcaccaagtataatctaactatcttgttggttttctttttttaagagtaataagttagwtgctgtagttttgagatatattaacagcaaatgtactttgccaatgagtagacaatggtatattttacatgcaaagatagaattaaacccactaatttcatctgattactaattgttaaaaaaaataaaaaaaaagatagtttctatccttctatccatgccaaatactttcaaaatttgtacatgaccatccagacatccatctctcctgtagggctcagctctctgtcctctagggtaaggctggctgggtattcttgcaccctgtgctgtgcaggccacacttcaccaggccccccaggagccccaccaggaggcaccgcatgatctccatattctacacgcgtaaactgagacacagaagctgatcaccttgctcggggtcctgtgactagtaggagtggggctggggtcgcgagccaggcagtgtggtgtttgggcctctgccctgaccagcctgcctcctggtagttgtctccctattcaggtttgtcactagacattaccgtctggcacagggcctggcaggtcagtggcctcaggtggctctgggtctgtggccaccgtacagagcgatttgaactgttcatctctatgacccgtctttgtgtgtcttgttaatagatgtttcccagggagtatatgagttgcataaaaacataygttccttttgtgaaaagtttctctaggcaggcatatggaatagagtgtgaaaatcatgtgaccactggaggcctagtgccttcacctgaagaggcaaaattcctgggtaacaagaatctacagaggaaaaacaaaataaaatacataggtactatgttaacgtataaatgaaatgtgtctcccaatgttgccccttacctcctccatacacagtcctgttccccagggggaaatctggtttctaaatctggaaaaggaagtatatttacttctatttgttatttgttggacattttgtgaagagataggaaagaaatattatgcagaatatctcatttgtaaaaagagagatacacagaaggtttttaagaataaaaagtattggaggctgaggcaggcagatcacgaggtcaagagatcaagaccatcctggccaacatggtgaaaccccgtctctaataaaaatacaaaaactagctgggcgtggtggcaggcacctgtagtcccagctactagggagcctgaggcaggagaatcactagaacctggaaggcgaaggttgcagtgagcggagatcgtgccactgcactccagcctgggcaacagagcgatactccatctcaaaaaaaaaaaaaaaaaaagaatgaaaagtattttgtttctttgtaagctgaatcaccccatcttgatggtctgtgactttttatttagcttaatatgtttgagggctctttccatgttaaccaggatatattgatctacctcaactttagctgtagcttcgtattttaacattccttttttgacagaaatgtgggcaactgccaggattttcttctgctttgtttctgctttcagagcaacagttgccctgcactcttgtgcatggccctcaaagctgttctttcttgccagctctcacctcattttccacatagcastaagatttgaaccaaggctgagagactccaccatgtctgtccagccactgtgttgcactcatgtgtcaggcacagcgcaaggtgacatgggggaaactgaggcagaggcattcctgcccttctaggccttacatttgaggttcaaagacatctagatactaataaaataatcacaaatttaaatgtacaaatgcactgtgacacaggtaacagaggagtgacgtgcatggttctgtctgcaagctcataatagagagattgacttagagtgggcaaggagggcctcccttgggaagattttttttttttttttgagacagagtctcgctctgttgtgcaggctggagtgcagtggcttgatcttggcgcactgcaacctccacctcccagatacagcaattctcgtctgtcagcctcccgagtagttgggattacaggcgcatgccaccacgctgggcaaatttttgtatttttagcagagaagggttttcaccatgttggccaggcaggtctcgaactcctggctgcaagtgacccaccctcctcggcctttcaaagtcctaggattacaggtgtgagccaccatgcccaaccaaaggatttgtgtgatagctacaagcgaaaaggagttaatgagatgaactgggaggtggagcattctgtgctgtggaagcaacatctgtcttgggtctgtggtgggagggaatatggtgcatctaggggctggagaaaggccagcaagagagcagccactggtagagcgggcaaagcctggtgggcaaggcggtggcagacgtgggctgggcctgaactgcctggtgcctttaggtcaggtggaagagtttccatgccatcttaagtagcgtagaaacctctattgtgttttaagtaagggcatgatgtgatcaaatttgtgttcaaagtgctctctggtaacagtgtggacagcacggaggccagtatggcttcagagagatcagcagaaaaacgttagcaagagtaggtgagagcctagactaagttggcaacagaagagatggagatttaagaggtgaagttaacgggacttggatagagccagctgtacaggaggaatagcagtgacggcaaccatggggtctggaaccttggcccaccatagagtgtacaggctttgagttggtttcatgagattaccacatgttttttaggaattgctttaaccttgaagagcagttccactgggcacatcaaataatacatcttgctcattccattcgccttttggagattggtatgcagatggcaactgcaaatgcttatattaaacatcgtatttttttctgtttctttccagtcattcttaaaagcatacaagcttctcattccatgagctaaaaacatatttcattccataaacagaagaaactatgtcagaaattgtaggctcctaaatctcacaaatgaggtaaacatacattaattgtttctcagatatttatggagaggcagaaaggaaatgttcagtagtatctcacttttaaaaggtaaaacaaaacaaaaatccagaagcacatagttcagcgtaaagctaatcacagttgtgcataaaatttgaataccatgtagtcagaggaaaggctcctcccatactgtggacaaaggatgtacacagctgaaacctttagtccttccctgtggcagcagccaacattttgctgcattctgcagtactgaaccaactcatcattttgaagcaagctccctgggaaatatgtaagtgaataatgctgctctgtgatgaatcacggactgaacacttcctgtatgtaacaggtggtgcgttaccatgatgtccgagaaaatgtccagctgaaatactagccccacaccgtgacgaaacgcacatagagctcaggctcagacctattgcctgtgcccagccctggaaagacagtgaccaagtaatgccctggtcatttaaatttgctaagcagcaaatgacttattggtgaagaccatcaagttgatggttttattgtaaaatttttgttagtttcactgtaactagattaaagagcaaaatataattttcttaaaatgaggggctgtgcttcagaagaacctaaagaggcttttgtgtgtgtgttgggggtgggggagttatgtttaatacagagatccagactccaccccagacctaagacctacctgacatcaccagagatgatgtaaaagcatgttatttgaaattttatggcataaatataagtcataagccactggattattaagataacagtggccacattcaaccagtttttcagaaaatacttttccaaagatggctgagtataaattatttttgtatgtttttcattcatagatctcagggttgaggctgggcgtggtggctcacacctgtaatcctagcactttgggaggccgtggcaggaggatcacctgagcccagaattcatagcctgggcaatatgacaagaccccatctctacaaaaaataaattagccaggcatggtggtgtgcacctgtggtcccagctactcaggaggctgaggcaggatcacttaagtctgaggctgaggcttcagtgagccatgctggcaccactgtactccaatctgggtaagagcaagactcgtctcaaaaaaaaaaaaaaaaggtctcagggttgaaaggtaaatgaagaaaacatcccctgtttttggagagatcagctcacrgggggttctgctacttctgagtggtaaggggaagggcatactgatgtccttctctgtccactctgcatctccatggacaggtgctttgtcaccctgttccaccttataaaagcaaaaatgttcccactgagaattaagcctattttgttttatcctcagcccaaagcgaaataaagccatagaaagtttttgggatgatttatcaatgcctgaattggcatccttcagagctgataygtgggctctttattcgtttattccctgggggtggagtataggggaaggtggcttacctgagtgaggagcctggggttggcactgcccacaggtctccctcctcagctggcctggcatatccagggaagacttccatctggaatacctgagtgactgctgggttacccatcactggagactttaaagagccctcttttaaaatccaacaagatagtgttcgtcagtttattttattgacgtataatttgtttgcatttaaaattcttagaaatacatcagtctttctctgcagtcacttttttactttacttacttaaaaattaaaataatgctatatgttaaacatatattcaataccaactctctaagaccgagttatcttttttacttgtagagtactttttaaattgtttaaatgacttataacaactatatatatttatggtgtacaatataatgttttgatatatgtatgcattgtgaaactgctmaatcaagctaattatgcttattttttgtggtgagaacacttaaaatctaccctcagcaattttcaaatgtacaatgtagtgttattaactaaagtcaccatgatgtacagtaaatctcttgaaattattcttcttgtctaactgaaattttgtgtcctttgaccaacatcattccagcctccctcccyacacagcctctggtaaccacctatcttctccctgcttctatgagcttgagtttttacacattccacatatatgtgaggtcatgaggcatttgtctttctgtgccygtcttcacttagcgtgatgtcctctaagttcacccatattgtcacaaatgacagaatttcctttaatttatcccatttttgtaaatgatagcacagttatagctgctcacgtcactttttgagtagttgttctagtcttccttccctttcagaaagacagagataatacaatctgttcaagaatcagtgactaaattaattttatttaaatattgtatgttttatttcaccctgtttggaaataataaatctatgttctgtttatctgtagtaatttcatataaaatacagttaatttaatagataagttagatttcaaatacatagataaattagatttcaaatacataaatgttaaaagtaatatacaagatgatggttttattgagtgaagatagttgtaattcagagaatatatgtggggaaatacaaaaaacaacattgtcatggccaatttttttcctgatattattactagaatgactttcctcttaataaaaaaaattgtgtgttggggaggagtgaatgttggtgggataggtcataccttagcagttacagacttgcataggaaagattaattaatatcttatcagctggaagcctgctgcctgctaaggacacagctgggaaattgggtgagcctctggagaagtctgtctaaaaaggagttaccaggaagaaggggttggaggaatggggatgggcacagagtaggaaagggaaccttaagttggcagggttggtgagaaaagctgcagtcacacagagcctgttttatgggcttgcccagccagccaaggatactcaccctgagccacctatggcctcagccttggtaatgtgccctgcaaactcttaatatgggccatatcatttgatacttagtttaaggcagagattggcggaacacagacacgtctgaggggcctagggagcacatacttgagtactgcacggctacagaggaggtgggaaaggacttctctgaacaggagtggggtgatttccagagacggtgacacgcaggagaagcatctcttcttcatagaaagatgccagctaataaatgtggaagaggcaagggaataggaaaccaccatgctgaaaaggcctgagaaatacaaggtgcaaatgactgtacatggagccaagccttctgtgtaacgaaaaagggggtatgagtaagtgtatgtgtatgtctgtcacctgtgtcacacaaatgcatgtgcacacacatccccccaacacacacacacccaagaaggataaacccaaagcaatggaaaatggctgcctatggggatgagtgagcaggggaatggggaggagggaataaaggtgagagctgcacaggagactcctctgactacattttttaatacagttttgactttagaaccaaatgtttttcatatcccagaaataaatagaatatatgaaacaagctcaccctgagattgtatrtagatggaagcagatgaatctgactatgtagcaaattgacagtattaccaacctacagggaaaaaaagatttcaagtaacttctgaacacatatcattttctatatattcttgtaggatgtagtctaaggacaaaaaactgaaatgaaatcttaagctttatttagatttattttattattaataatattgatattattattctaaacttattttacatatagtaggactaagtaaataagccaatatattaatgtaattaagaatctaagttatcactgtaagaaagatgcagatactttgtttaaaagtaaggaaaatctctgtaatattaaatttgaattggaaatagtacaaaatcatatcaatattcgcacacatattctaggctttattcatgggaatgagctagaagctatgaaacttcagtagcagtgagcatgtattacaactagatcttgctttctaaataccactccccaataaaagaaaccaggacttcctggagaaattgctaatgaattttagatcttggtcagggataaaccagttgaacctatagcattttatgccaaaatcaaggttgtactcaaagactaatgagattatgtcaaaagaacacaagagcctgcatgaaagggctcccacaggccaaatttgggacaatttgatcacccaaagaatattgacaggaattgattataacacattgaattttttaataaatatatgcatctatggtaaacttaaaaaaatcaaaaatactgaaaataaatagaaaggatgggggatgtttttccttacagcatactgtaatgccaggaaataaatgtagaaatgataagattagagaatgactattttgcaaaggccaatataagatctaataataagaattgtcagtgtttgccaaaatgaccaggtaagagatattctgggagtcacaatattcacatgaccttcaagtgtcacctatagattacttaatttcttttttatgatggaaaactgagccttaacaacaaatagaagaatctagtagtcaacaccttgctcaaatttagcaaagccagtagtgatacagcttcacattatgtccttgagcttggatgtaggaaagaaaaagcagctacagaaagcatgtgggggacagttggatatattgaatgtaggcttcccattaagtgatattgtaaaatcatttttcttagttgtgataacattattgtggttatataggagatccatgctgaagtcatatttagggatagaaataatatctaaaactaagttgcaaatggttaggggaaattctatgtaagatatagatagagagatattgagaaacagcaagagaaagccaatgttaacaactgctggaaccaggcaaagggtattcaggtgtgtgttatactgctcctttgcctttactgtggaggggaggatgttcaaaatgagaagctgtggtgaagaaagctatcaaggggcagtaatacagcttcattttctcttccaggtgcttacaaattgattatgtgtaattttaattcttctttccaattttatactttccagtataaaagtcaacaaaatgtctgtaactcccaaagccctttaaaaaatatgattaaatgacagcataagggttttcttccccagtgagctatggtcagctgtaatgaacatcaactgtcctgtagcctgtggccagatgccctccccacaggggcctctcgcgcagactcagggagctttggtcacctgggcccaacaagtgtggagcagagagcagaacacagtagtgartgcacagctggcagccttctgctttgattaagatgcagaaagtgttgagggacccagggcttcctgagttagagagactgtgggccacaggccaaggcttaaagagaaagagctgcccctgtctctactccaggcacagtggctgtagggacagcacccaggccactctgctatgtgtcgctgaaccttggcctgtcttcttaaagtactgtgtgttttccaaattgtttcagacacactgggtcttcaatttccagttctcatggatgctgtattaagaaacgcaccagaccatattaatctgacatggctgatttgggttgacattgactgttttatcttcgtgacactctgtaatgtcacactcctacaaagatcctccttgtcagacagggggccttgagaggccatcgtgaaaccaaattttctctccagacatctgtcctttaatcttttcccccttattttatgtgtctaaacaccacagttcaaaatatgtttagaatctttaatttggttctaaaactttaatgccatctcctcttcttatcatttctgtcttcatccccttcatctcccttggtagcttgactatttcaaaagctggttgtatccataatggttttgtagtaaatgtggtagcttatggtagctgagaacactggttattttagccaattgagttttgagttggtgggaaagaaatcatggccgaggtgttcaaaaccaagagctgatatgtggaaaacaagcattaaaacagtgtcactagaaartgacggcggtggaaagttgtccatagagtaactctgctttcagggctccgtgtgaggactgagggggcaccctgaaatccacactggaaacaggcaggcccctttatgaataggagctccagctccatccatggtagctgtgcgtgctcattcattaggccttactggtttgttgtgagtgcagtatcagcatgatttatggcataggcagcctggaaataacatgagcagcacatagcacagccgtggctgtattcatccaacatatcctgtctgttcaaaggaaatgtagaaatctacttcttaatgacattttgtgctgctttttaatttttcttgcttttgaaatactgcattgttcagtactcctgtttgggagtcacttagagtgacgcagtgtcagtcagcccaagacttggtggttatctctgttttgtcagatctgagctgcactcgcctcttttattcttgtaaggattgggcatacaaacgtttcttctcaggaatcaaagaaggctctcatgagaaactgcctccccagcacctgagggccccaccatcccaaggcaggactctacatgcaaacagcatccaccctgaggacaacattctgcacagaaacctctcaaaactacagaattgtcatccacactttggccaggagtactgggaagtagctagaatggagttgagtcaattctcagctcttagaagttctttttttttttttttttttttttaaataatgttctgggaaagctagttacagaggcctttcacaaggacttcattggctacctgtaacctctggcctaagtatgtatttgcttcgtggttccatctcacatgaaattagtataaggtgaacccagtgatggctgcctttaacaagggttagcaactgttaggatggatgtgtggattgactcagccagcaccaccattttgaatgggttagtgaacagtaaaaaagaaatataaaatcctattactagttatctacccaaaggaaaagaaagcgctattcacaatagcaaagatgtggaatcaacctcgtatgcatcagtggatgattgtataaagaaagtatggtatctgtacactatgggatactatttagccattaaagactgaaagaagtcatgtctttgcagcagcatgaaggaactagaggccattattttaagtgaaacaccttagacacaaaaagtcaaataccacctgttctcacttacaagtgggagctaaataatgtgtacatttgggcatagagggtggaataatagacattggagactccagttagtggaagagtgagcgtcgggtgaagaagaaattccttaatgggtacagtgtacactgttcaggtgatggttacactgaaagcccagactccaccgctatgcagtatacccatgtaacaaaaatacacttgtaccattaaatgttatacaaataaaaaataaagacaaaaaaatcaatcctcacatcatatgagaaaaaatgaaaagaacacagctgactccttatctaaacttaggtaaaattatcgttactagttagttggtattcctttccactcaagcactctgaccagctggctagaggtaacaatctttcagaaaggtcttaaagaactaaaatgactgagcacctgcttctatccaatgagccatcccctagagtgtgaaccgtaatttggcttggatatagctggcagtgaggaagttttgtaggattatcttgcctcagcatttcttaagaactcggggagtggggcctgtcaccttaatccctttcagaagttccaaggtaagcctgccttaggctgccttagatcaggaaaaggtcatcactacagatgtaacaagagctgtcagatgcttgcttttattttcaggtgaagtcctatacctctgttccttagtgctattactgttagagagatgggaacaggagagagtggaatgagcagtgtttacctccttgaaggaaagtgctatgccaatacaaggaggtgctgcgcaggtcagcagtgcgccagcatactggtttcgtacaactcagaaactatcctgtttgcacatagcatttgccgaaaatattcagctgtctaggactagtgcccagtagagagattggcagaaaaacactcattttagctggctttcaaattatttttcaaattcaacacgaagtcagttaaggaagaccattagattatgtcaaaaagcagtttggaaaacatttatcatttgtagggagcccagcactgacgtttctaaattgtgtgtgacgttgacatgttcccatatgtcacgatatgttccttacttcccttgttatgagcttgggttagaagtcactgttcttttgaaccttgatgtcacctcagggcagtttgctagcactcagaaattcaaaattgcctaaagtgcgtggtgggatgtctatctgtatcataccgtgggcaaacgtctgacttgaaggcatcaaacaggcaaayggaagaaccatgaaggatgctaagttttgactgtgtctgggtagccaattgggagtgtattatgtagaaagccaaataaatgcttatttcaagcacttcaaggtaaaggacaatatttaactctggtttgttttgagagattagagtagtttatgcccataagaaatattcagaaatagttgttgagtgtgtgagtgaacagcagggcattaaataacattatagtcatggtctttatgagcgttaggccaatgttctatgtaatgaggtaaattatttaaggttcttataatgtgttattttaggtaaggatgttgctatttactcagtgttttttcacggaagatagtgtgctctacagattccgtgtcactaagctaagcatctatgaagcattattgataatcactcagttgactattacatacaaatttcaatgtggtcatcaactcttaaayttctttatagttaaaggataggaaaactgacaaaaaatgttactttttatcacttagtagaatttcatgagtcactagtttagaactttcatttccattcacaggacaaggttaaaagaaacagaattaagaagttgcttaggagtaggcttttctgtttattgggagtcggtattggacattcataaatttataatctgcattatgtttcagcgatacgttaatgctgagttcataggattaatcaggccacatgctgtcctgtggcttcactaatatactcctcagtcacatcagcactttctctttcacaccacacacaaaaagccttacggagcagtgggtaagcagtcctaacaggcaaatgttcacacatagtgaaagagaagtttagtttttctgtcatggttgctgaacaagataatattctctaattctttgataggaaaatagagccaaggcatttgactgccgacacactctcattggaactccatgcaggacttcaccagtcattagaagctcattccaggaatcccagcctcgaagggatcatggagaaggtgggatggagtgacctgagtctgatgggtagaaacagccacccttgctctctcccaccttcttctgtgtggacactctgcctctggaatttttagtaactgggtacctgttggaagattagttccttttgctaggctatgaactagagggagggtgtgcattcatttcactaaagtaaaattttgccttttctttgttgttagacagsatcttactcccatcatcctggctggagtgttgtggcacaaacatggctcactgcagcctcgacttcccaggcccaggtgatcctcccacctcagcctcccaagtagctgggacctacagacgtgtaccactatacctggctaacttttgtgtttttttgtagagacagggttttgccatgttgcccaggctggtctcaaactcctaggctaaagcgatctgcctaccttggcctgccaaagtgctgtgattacaggcatgaaccatcacacccggccaaaattttgccgctgatttttagaaattgaattattattttagactgaagttgtatctttttaaaatgaaagccatacctccgtatttctaagaaatcagatgggatcatcatcccatcaggtattcactgagctcctgcttgtgctccactgtctgctcagtgctggttctgtattgcggagaggatctaaacagaaagtaatccaaagggctacatctgtctttcttaatgacgaaccgacggctttccaccttacccttttggctacaaccagtgggattgactgctgtcttattgactctgtttatctagatatggtggacatattgcccagttagatgggctaagataccgatagccccccaaaatgccagattccagaataaatgaaatcactcagtcattaaggtgatatatttaactgggctggctgggctaatttgtccatgttaccaattattattgagcagacaaastcaggtaatgatggcagcaaaagcccatctggggcctgagactagaggaggaggaggctggccagaccctcctcagatgcgcagaggacagcttcaggataaggagagatcagatcatgcctgctccatctcggcgggctcatcttctctcgcccccatctgcatggtcctcttgattttcttcataataataacactgaaatcctttgagtgctaacattactgtaagtgtcagctgtttatgctgttatatgccttaagttatttcagccttaccacatgcagtgaaggagacactagtattatccttatgttgcagctgaggaaactgaagtgtggagtttaagtaactggcccaaggtaacagatgcagtgatcagaggagcagggacccacagccaggcactgtgacrcagagcctgcgctcctcactcatatcctgcttcaggcttcacaggtcttgggaagaaaaagagaacgtttacaccctgaataacattgcaaaaggatagtgcgctgtgtctgccggtcagcagagctctttgatgatatwagtaggagacacctaagcaaagtaaagttgaggtcagtgtagctccataacaaaagatagggaatgctctaggtctcctcaagaaaaatctacaccatggttttctgttttcacctacagcttagttgcccaggaagattcatttattatttatttaagtaatacatcacagggacaagattcattgaagtgaaggtatttcacttccaactgtcctacagggaaacaatgagcctaaataaatcctacaaattctccctggagagggagcagtgattgattcatttttgcatctgtcaaatgcctctatagtccaaagagtgcgttttgttccctcccttaacaagattctcttacctttgttttgttcaggctttattggcgctgtgtgtataaataagattacaatgaatagaaattaacactgtatcccagttttctgagtcaaagccccaattccaaacagaaaaaaaaaatcttgttgttaaataatatatgggtattatttgtcacatatgataaatattgctactcatgcccaaaaagagactttacaactgtccttgtgctagacgaatgactggtctacaggctacagactattcacagagctttggggaagccctgaaactcacctgatagcagtgtccttgggactgaatataaacttctacagttacaaggccttaagaggttacaaagtagagcaagtttggggacttcaaaagcagtgcctgggatggcagacatcattgccgtggtgcaggggcctctctatgatcccatcgctgtgcccccaccgagacccaggtggacagtttggaggtggggagggagctgggatgtgactcagcagtcatgtggggcaaaaccagggtgggggcacgaccctgctagattagcctgaaggtggggcaaatgactggcaccttgtcacaagacattgttgtttttacgcatttgacttgatttcacccttcaggctcagggctggccctgtgaggcctttccactgcattcagttgttctttcttgaatgttagagggaggaagttggagtctctgttctggggaactgaacacaccgcacgcagcccatctggcctgtgccgtgacccacgcagcacaaatcactagttccagcggcgacaacactaacatttatacatcatgcaagttgtagtcttttattttaacttaaactttttattttcaaataatttcaaactcacaaaaagttataaaaatagtacaaaaaattgccatataccttttacccagattccccaattattaaaatttcacatttgtgtgtttctgtatatgtgtgagaaagtaaaaaacacgaagcctttttactcctaaatacctgggagtaattcctaaaagataaaacatatattcctttacataactgcaatacataaattataatgttcaataatttaataaagtatatttgtgttactctaaatggtaaaataagttttttctcctattaattaatatgattaataatactatgacatggagattagaaaaattaagatttaaggccaggcacgatggctcccgcctgtaatcccagcactttgggaagctgaggcagacagatcacctgagatcaggagttcaagaccagactggccaacatagcaaaaccctgtctctactaaaaatacaaaaattagccaggcatggtggtgcgcacctgtagccccagctactcgggaagctgaggcaggagaattgcttaaacctgggaggcrgaggttgcagtgagccaacatcgtgccactgcaccccagcctgggcaacagagcaagactccgtctccaaaaacaaaaaagaaaagatttaaaaactaaaatataatcttcggttttacatatatattaatgattgtttctttttcaggtgataatttttttaaatatgtgaatggctcattagtacttgtgtccttttaaaaacacttatgaataccacagcaaaattaggttgtggtgctattactatatctatttattagtctgctcaggcttccataacaaaatacgatagactgggtggcttaaacaatgcacatgaatttttcacggttctggaggccagaagtctaagatcacggtgctgaccaattcgtttcctgctgagggctctctccctggtgtgtggatgaccaccttcttgctgtgccctctcgtagaagagagttctcttcctcttctaataaggacaccaatcctatcagattaggacccaccctaaagacctcatttaattctaattacctcctagataccccatctctaactataatcacattgaggatagggattcgacatatgaattttggaggggcacaattcagtccatagtgcacagtccgtcatttcatttcaacatcattggagaacaccttcaagcacatgatacctcctttgatgtgttttgctgtttaaaggcgtggtgaacccttgacagaaacattatcatggattcttctccacatgtttactgacttcattgtgcttttcaagttttcttcctccttaaacaacataaaacattttggaaaaagtactggaatattaaatgtgttgttcaaatttgatgctgatgcttgaatttcaaggcaaggcacatcatgggcttgaccttcatgtcttcagactcacagagcttccagtttctcagactggattattataagatctcatacgagttattttgagggaagggaatggaaaataaagattaaccagaaatcaaattccattttcccagccctcccttggcaatgcctagtggtcacatttcaaaatattatacaaacctattttacagtaaatagacatgttttgaagtggtgctagaaagaagaggggcgtctctgccatattctagttatcatatttctgttcattctctgctcagtgtgggcccagaggactgaaaaacagtcagtaagcacctctactttttgcctatggcatgcagaaatttctccatatgcaaaaaagtggggagaggggagaaagattaagatgtttctgtctggtttcagtcacatttttagttctttcccactttcatttgttctctgattttttttttttaatggtaagaaattggcaggtttctcacggaactgcctgtgtttaccatactactgataattcttgtaaactgtctaccatctcagttccttacctcatcgcagctttttatttctttacagatcaagaccatcatccttttaagcatttttctccttgactctgtctcgattgtcctgttctctctcacctcctaggcaattaccttatcttaataaaatataattgggccggtagacgtttctttctatttgaaaagcctcccagcctagcctgtggactgatctccctgccagccagtgtataggtctccacaggcctcctcttcttccatgaagggactgctaaactcagctcaggcagcatagggctatgattgctttcccattcatcaccccgaaaaatgagtttgcactttaatttataaatataaaatatattttcttggttacggcgaatcaaactgaattatatttgtgcaattactgagttacatgaccgaatgtatatctacgtagttgagattattcttgggaaatgcaaggagggactcccatctgattcagttatatggagcagctctagggtagcaccattctgggctttgagggtaacacgatgtaactggtattgtatacattaacattagtagagttccttggctgtttaaaatagctagaaatcagagaagtatgatacaaactactacggactgaatttctgggtatgtgttgtattaaaagaaaacaacaacacaaatttcggaagtttttgtagaacaactggctttcattctttaaaaaggtyggtgtcattaaaggaagaaatgctggggattgttttaggttaaagaaacatgatgacttaatgtggtgcttgatccttgattcttgagcaaaatgaaaagtttaaaagacattgggaaaatttggaagatgtagatatgcatatatattagataatatttttgtatcaatgttgtatttcttgagagtagtaatactgcagttatatggaagaattccttgttcttaggtgatacatgctaaagtattgggggaaattgtcataatgtcttcaactttcaaacggtttggcaaaataagtgtatatatgtatgtatgtctatagtgtgtgtgtgagaaagtaaacacacacacacatgcatagtgaaaaatagaagttgcaaagattcatttttgtcattccttatttcttctaatcgagtaaaagttttctaaattagctttcctactaataaataaaatatttttcttatgctcggtcaggaaagctaaatgggagaggcaagcccacctaagtccttccctgtcaaggagggggtagaaaatacatcgtaacagtacacccagcgacctccagagtcactggttccatatgtgcaggattcacctaagccacatgccaaccacaagatggttttctctgagacttcttggaaaaataaacccaagaaattcaaatcacttgatgtcaaaggatctaaacagagattgcagactttagctgtgtagctctctggtttgtgagcagaatgagattgggggtggggaattgcactcattattgaacacctcttctgcttgcagtttcagcagcagcagcctagcttccccctaaatgtgacacttcttacttgtcatcacttaccatactttgggaggtattttatcctcttctttatgtgtgtgtgttcagttgtgtggggaagtgaattgagtcttaacattttgaagtaaaataggcttgttttctttttaaatccctctagtcatttagtgaaatactctgataaggttttattaatgaaatataaatagaaggaagattcgttttgaaagcacagtgccatcttagaaaacaccaaaagaggaaagaaaaaaaaaatgaagactgtaccttgatgtcagagctttgggggagaaactgattccaccttgaagggagatgacccaagcttgacagctgcctccacaaggagtcctattagcaaaagaaggggagccatgtgctaggagggccattttctctgttcttcgcatcactgaggagtgttcagcaatcacacttggacttgatacagaaaatgactgcattgagagcccttcttcataagtaagccatatatggtaactaaaaaaacaaaaacaaaaaaaaaacaaaaacaaaaaccctaacacttcccatcacaaaaccaatttttttgaggattaccaggctcgtgttttctctctagtatgtcagggtttgtgatacttctggtcagagtgtggaaagagtttgggctatcagcacaggccatattctgtttgcttcatatgcatttggagacatgaaatgatattttactggttaagtttccgctaagtgcttagattttctttattgcgtttctcttacactgttaaacaaaatattgtgtggctaaatgatttcagcctatctaatttgcttgacaattagacagtcgttctagccttaggaacaamatatgttcatcataaaaaaattaagaatgtgatctaaagttcaaagctgaaatattaaaacattaataaatagaaagctttaagaactattcactcagtatgcaaagaaacagtcatttctcgctgctctaaattctattcctgcacataaaaggaaaatatatcaagtttaacaattcaatacaaaaaaaaaccctgcaatgtgagttctccaaacaaacatccctatyatccctacatacaggtatagccttaggttatatttttatgatttcatttttgagrtatatacaaaacatgcatatggttttcatcactagaaataaactacactgagtcctttgggtttgctttctttatttctttattatatgtttaattgatcacgtactttataactttcagtattttgacattttagagtacagcaatgtgctgtattgctgtaatccacatatagttatatttggaatgatacgttatgcttgagttagaaaaataatttgacacatccactacccataacacatgttcagtggatatcatgcctgccagaaatatttccatttacacactgctagctctcatacataattacttacttgttcatctcaggacatagtgtcagattgtactatgtaatataaaataatcttatctagttgcataatgaattttattatctgagagttgtttatatttgatggcattttccctcttagagaaaatgaattttaatgagagaaaaattgctaacgtttttaaagccagcactcacattttggcattacagcatatttggagtgcccggtgattaggatcactgttctttggtggcagcgtgtgaggtctgtgaaatgtgggaaatggtctgtaacctaatggatctcataagaactatacatattgaaaggtgattaatttaaaataagggatgagttgaggataatgattgctttggagttgagcgaaaagagaggttactatgaaccaaaagagaagatgcatgaagatgaacaaaatgtgaagatgcaccaagaaatggctattgtagtagtagaagcagagagaaatgcagagtgagatgagggggagagagaagactggaggcacaaaaagactttatcaaggctgaatttttattttattttattttattttgagacggagtcttgcactgtcrcccaggctggagtgcagtcgcgccatctcggctcactgcaagctccgcttcctgggttcacaccattctcctgcctcagcctccygagtagctacaggcgcccgccaccacatccagctaattttttgtacttttagtagagacggggtttcaccatgttagccagaatggtctcgatctcctgacctcrtcatctgcccgcctcagcctcccaaagtgctgggattacagtcgtgaaccaccgcgcctggccctgaatgttttaataagcaacaaatgactgatgttcctaaagtaatccattcaaattcacatactttaatagaaaaataggcaaaggacatgaaccatcagtttataaaagaggagatgcagatgatcaatatatgtattaaaggctgcacaacttcattaataagcaacaaaatggaaattttcaaagtaaaatgctaggtatcacatcatattgacaacttttgaaatcccattagggtacagtgaaaagggcatccttgtgtgtggtgacagagagagactctgcttcaaaaaaaaggggttggcggggtggaaattgagacacagggagagaatgtgaagagacacggggagaaggctgcgggaggacagaggcagagattggaggggtcctgccacaacccagggaacatctgggccaccagaagctgaaagaacaaggaagggtccttcctctacaggtttcagagggggcatggctctaccagcatctggatttgggatttctgggctctggaactgtgagataataaatttctctggttctgatccgcccaatttagggtactttttacagcagccctaggaaattagcacagaatccaagtgggacagccgaggtcatgggtggatatgaaactgtagagttcaaaggagagatctggactagaraaataaaatttggagttttcaccrsatgatatttcaccagaatagaaattggtacagttttgtggggaagcaatttatagcttgcaccactactcaaacatgagtctcaggtaaattaatatacttagaatttcttctaagggaattttccaatgcagtgatttatagataggattgatggtcacgggattatatatgacagtgaaatatttgggcactacctacrtttccaataatggtgacataaataaatgatggtgcacatttcattaagtgcggttagtcattaaatcctgtgttttcaggaaaagaattcatgacatagagaaatgatgaaataagtggtacagtaaaatccaaatgtcatttaaaataaaaatgtataaaaaagactggataggaatactctgaagtgttagcaattctgaatagtgaaataatgatttgtattttcttagatcttctctatatgttttagattttatgcaatgaaaatgaattatttttagagaaattatattacatgttcttgtattttaacaatttattgagacagaaaaaataaaataggyagagtggagtcccaaagagagggactgattttatgaatcagtaaatgccagtgttatccctggaccagcaatgaggttgctgaataaaaaagtgtatgtttgtgtgtgttrgtgtgttgtaaagctaggaaaaatgtttggcagtttgaaagaaatatatctgccaacaaatattcagaaattacgtgccatattttttaaaaaagaaaactttaagcattctttatagtaggagaaacagggactaccgaggtcagaggaaatgagcagagtctagaacctcagggagcaacaaaggatgggcatggtcagcaaccataaccgtaagctgagctctttcagactcctgcaggccttggcctgatgcgtgcyctcctgtgcagccacgccacttgtacacagttcattttagtgcaggcgagttatctaaatcccacagtaaacaccctcagtatgactagtgcacaggtacatgctgaatatgtgtctcttcattcatttaacaaattccacatgagcagctgtgataagccaggcaaggttctaagctttggagaacaaaattaacaaaatctctcctcttgtggggcttgctttctgatgggaggagatagaatgtaatkaaaataagtagcttatttgtactatggagaaaaataaagctgggaaggtagataaggagtggggtaagtgagacttgtaagtagagtggscaggcaaggcctattttttttttttaaacacggtctcaccctgtcacctaggcttaagtgcagtggcaccatcatagttcactgcagtcttgaactcctgggctcaagtgatcctcccatctcagcctcctgagttgggaccacaggtgtgagccaccaccctgagctaattttttaaaaaaattttgtagagacagaatctcactatgttgcccaggctggtctagaactcctggccgcaggcaatcctcccaccttggccccccaaagtgctgggattacaggtgtgaatcactgcatcctgccaaggccttacttttgagcacatgattcataaagaggaaggaagccatgaagacatcaggggaaagaaattcgaggcagagggagcagacagcagtgcatgcaggagagcataagcatgcgtgctctgggaggggacagcaaagagtccttgtggccggagcaggataagcagaggaaggagtgttggcagtttaggtctgtgctggtggggaagccagtgaagtcagatagggcataggggctgctgtaaaaggcttcagcttttattctgaatgcaatggagtcccgttggaaggttttgaaaaaaggcgtgacattgtctgctttctactgtagaacagaagagttttctgtgcttgtctccagttccttttggaggactaagtgtggctgctgtgttaagcatagaccaagagatggcaagggaggaggcaaggacacaagcgaagagactgcaccgacagcacaggccagaggcagtgatggctggtcccgagtggtagcaggagagagatgggtgggtttcagacgtattttcaaggtaggaccaacagggtttgctgatagattgaagtgtcaagaaaaaaatcaaggatgtctctgaggttttcagcttgagcaactacaaagatggatttgccattttctgagaaggaaactacaggaaaatgaggtccgggtgggagatgaggagaaattaagaagtcgggatttgtttggggactgagaaatttgaaatgtctctgacatctgtgatggatttaattgtgtccccccaaaaagatgttgaagtcctaacccccagtacctccgagggtgaccttatttggaaacagagtctttagggagataatcaatttaaaatgagacaattagggtagaccctaatccaatattttataaggacaagaacagaaaaccagacaccgcaggttytcactcataagtgggagtcgaacaatgagaacacatggacacagggaggcgaacaacacacaccagggcctgtcagggtgaggggtaaggggagggagagcattaggacaaataactgatacatgtggggcttaaaacctagatgatgggttgataggtgcagcaaaccaccatggcacaggtatacctrtgtaacaaacctrcacwytctgcacatgtatcccggaacttgaagtaaaattaaaaaaaaaaaaaaaaaaaaaaaaaaaaaaggtgctcgggcaaggtggctcatgcctcatgcctataatcccaacactttgggaggctgaggtggcagatcgcttgaggccaggagttcaagaccagcctggccaacatggcgaaatcctgtctccactaaaaatgtgaaaattagctgggcatggtggcaagggcctgtaatcccagcttctcaggaggctgaggcacgagaatctattgaacccgggaggcggagtttgccatgagcagagattgcaccactgcattccagccaaggcgacagagagagactctgcctcaaaaaaaggggttgggggyggggtggaaattgagacacagggagagaatgtgaagagacacrgggagaaggctgcgggaggacagaggcagagattggaggggtcctgccacaacccaaggaacatctgggccaccagaagctgaaagaacaaggaattgtccttcccctacaggtttcagagagggcatggctctacctgcatctggattttgggtttctgggctctagaactgtgagataaatttctcttgttctgatccgcccaatttagggtactttttacagcagccctaggaaattagcacagaatccaagtgggaaagccgaggtcatgggtgratatgaaactgtagagttcaaaggagagatctggactagagaaataaaatttggagttttcaccagatgatatttaaaacaacgagactgtatgacgttctgaaggtgtatagacagtgagccctgggggaactgttgctttaaagggtttgggagttgaggaggaactagcaaagcaaactgaaggcattgccagtgctgtagaggcaaaccaggaaggatagttccgaagtaaataaagtgttctaaggagaaaggaacattcatcttgaccaaatgctactggcaggaaggaatgttcatcttgactaaatgctactggcacatcatgtaaggtgaggactaaaaagtgaccattggatttagcaacatggaggtcacaagaaatccacactcatcgattcagataggatcaaaatcctcactggaacgagttccagagaaacttggagaggaattagagatggagaataagtagctctttagaagacttgggctatcgaaagcatcagagcaatgggataccaactggaggaataactggaggagagttgcacaggcgggaatagagagaattgctagggcggcctcctgcacaacaggaaggggtgaaatgtggggcatgggggagagcccgtctcagtggcacagtcatctcagcatcagaacagggtggaaggtggagaaccttggggaattggggaagcttgtgtaggtctcttcttctttttttttttttttttttttttttgtttgtttctaagacagagtctcgccctgtcgcccaggctggagtgtgtggagtgcagtggtgtgatctcggctcactgcaacctccaccttccggtttcaagtgattctcctacctcagcctcccgagtagctgggattgcaggacccgccaccacccctggctatttttttgtatctttagtagagacagggtttcaccatgttagccaggctggtctcaaactcctgacctcgtgatccgcctgcctcgccctcccaaagtgctgggattacaggcgtgagccaccgtgcccagccaggtctcttctgattgactcattttcctcaatgaaacaggaagcaaggtcatcagctgagagtgaagatgtggagtgggagatgtgaagacagagggggaggcatgaaattgttctgttgtggaaacgaagggtgaatggactgggaagggcagcacaactcccaggcagcatggagggctcgctggaggctgtggccatgcactcgtcagcatggctatgccagccagaggggagtggactctgtgcagggctgtgaccaggtgtcaggggtaagctggggagttgagggttttgtgagggaatgatgggcatgactggctgtagggtgagctgggtgagaagagagaccaggacagaagatgtcaagacctttgttgaatgaatgggcaaagataaaaaaaaagaaactgtcatctcaaacagttmaagtcaggactgcaaaagaggaccaggtgcctgtgcctggtaggaaggaggaccaagatggcttccaagaggaaaagtcttaaagcatgaacggaaatttggacagacagatgagcaggtgaggaatgggcaggtccaaggagagaatgttgtgtgccagtgccaccccaraggcggcaatacaggtgtggcctgcaggtaatgcacttaccaacaggcctagaaactgccttcttcattactgaggattagtaatagtaattattatttcttaattataaatttaatgctyctttgtcactccccagtgtgtgtgtatacacacacacacgagaattatgtatgtaacaatgacatatttacatatgtaagaaattataaaattatctatggctggacacagttgttcatgcctgtaatctcagtgctttgtggggggccaaggcaggaggatagcttgaagccaaaagtcagagaccaacctgggtgccatagcgagaccctgtctctgcaaaaaaattttttwaattagctgagtgtgatggtgcatgcctgtagtcccagctactcaggagcctgaggcagaaggatcacttgagcctaggatttcaaggcttcagtgagctatgactgacctctgcgctctagcctgggtgacagagtgagacctggtttctaaaaatttaactaatgtgtacattgtataaatataaaacaaaagcatattgtctgtctcctccccctacccaccacccgtctccattccaatttccttcttcagatcttatgaacattcttcctagccacctttaggccaactcctcatctgctgggtttcatgcagtattccagaagaccagcctgaaaatagagaactcaagctcttgtatgtttagtctgggttcctgccaaataacgtgcagcactgtcgagaatgatgtgacggacagagcttgatgcacagcatgatggggcaccctgtccacttgcctgtgagtcatgaacatttcatcatagggtttacagttttttgttatagatgtttaatcacaaaaataacagaggccacttatgctaagtatattctgtgaggatcattcttgcacacgaarggtaacagcatgaccttgatatggtaaggccttggcattgcagaggagaacaggctgcagaaggtaatgtgcratctcataaactggactccttgtcagcattcttttgatatttcacaaatgacaaaagtcatcaagagaagattccaatggttcagatatttaacggtcacccgtgtttatactacttttgaatgggtgaaactttaggatggggattagttaaatcatgctataaattcaggcccagaaaataatggagaaagaattcccaaagctactagaattctcccacaattgagatgtcagttcacacccacagagggcttctggtggtgacagttggtggaatgagagccaggatcctacagcarcagcccttcatgaagggcacatgaaagctctgaagagtgcagaaagtctcactgtggtcactggatgaaattatgacctccagtttctcagaaaactaaaagtgkatcyaccattcgatccagcagtcccactactgggtatgtaaccaaaggaaaataaatcattatatcaaaaagacacctgcatgcatrcgcttgtcactgcactgttcacaattgcaaagatacggaatcagcccaaatgcccatcatccgatgagtggataaataatatttatagaaatatttatataccatggactactactcagtcatagaaaagaatgaaataatgtcttttgctttaacttggatggagctggaagccattattctaaatgaagtaactcaggaatggaaaaccaaataccacatgttctcacttataagtgggagctaagctatgggtacgcaaaagcagacagaatggtataatggacaytggagactcggaggggggcaggtaggggagtgagacatgaaaaactrcctattggkgtacagtgtacactgttttggtggcaggtgcactaatatcccagacttcattgctatccatgtaaccaaaaaccacttgttcccctaaagctattataaaaacttgttttgcaagaaatygaaacaaattttagaaaacttttaaaaaattatgactctggattcctataaatgtctgcttctgtttggtgttgtatctatagcaacatagtgacaatattaggtagcaatttctgaaccacagctttgaaaatttgagcaatggtgtttccaatttcatttattaaattcttttaaaaagtttagttattaccgatgatggcaaagaacatttaggtttcattaagtgakagttttttatgttatagtattctatgttttctttatctattaatgggtttttcttcttatctgcagtgaccctgtctctttgaagttttaaatccagcctaagttttcaatagttggtttgtatttctaatacgaaattcagaacatccttgatcatgattttatttatttattttgagatggagcctctctctgtcacccmggctggagtgcaatggcgcaatctcggtccactgcaacttcagcctcccaggttcaagcgattctcctacctcagcctcctgagtagcgggattacaggcaccygccaccgtgcctggctaatctttgtatttttagtagagatggggtttcaccatgttggccaggctggtctcaaactcctgacctcaagtgatctgcccccttggcctcccaaattacaggcgtgagccactgcgcctggccatccttgataatgatttaaatccacttttccataggactaagcttgactatctttgacaccattttgaccacattattaactctagcaaataggataaaatataacagtcatacttttaaaaaataccttccctacatccagaactgggtttctgaaaaataataaataggaaaattcatggttgagggacaacattgggaagcaatagcaataggtgacctgtgagaacccgaaaatagttatttcttcattccacataatacaataaaggtgaagcaccacataaacagtccgccaattgtataaacatattttaaaatagtaataacaaatattattcagtagttcttatttaccatctcctgcttggcagaaacttttcaagaatctgccatttccaaaatttcatgaagatacttataaaagcatctcccttatttctggaaatatgcctattttcccatgtgtctgttgtgatagacaattgttcagagtcattctggttttaagactcagttattctttctctccttgccttaattctttccttaagtcctacctagtgcttttttttctttctttctttcttttcttttyttttttttttttttttgagacaagatctgtcgcccaggccggagtgcagtggtatgatctcagctcactgcagcccatacccgccgggctcaagtgatcctytcatctcagtctcctgagtagctgagactacaggctcatgccactaggctcagctamtttttttcgttcattttttgtagagacyaggtctcsctatttttcccaggctggtcttgaactcctggactcaagggatcctcctgccttgacctcccaaagtgctgcaattacaggatcaccacaccaggcagctattgcttcttatctggttccttgagatgcagagtaaccgggctgctttgaatgaaagaaggcttggaataaccatcatttaacctatttcacttaacccagccccctgtctgtcaataaccaggtttccctagcctaagctctatctgtgattccttcctgctaaagcacaggcctaagggcctctcacaggagagtgcagttctctttctgtcttcctcctttcccttcatattaattggttttgttgcaaaaacccgtatttctttaattttttttatttyttcccttcttttcatggaagtcataaaaacctggtcattctatttctaaccccggttctctctctctcttttttctttttctttaacgtttttccaacaagattgtctgtttatgcatatcctctgtatctggaattgtcccaatgacttcaaatatgtgggggtatacatytttgtgcactaaaattttgaataacaagaatttttrtttgaaagggatcatggcatcctattttaattaatctcaataacaaataacttgttcaattctagaaccacagtctgtcatatctacatataacagtaatagcagttcagatatgtaaaacttgttattgctcatcctgtaaggcraagaaaacacattctgctgatgtctttgttttcaatactttttctctcattcattgtgatcagggtggtaatayacctgttttaatttatttttgrtcatttttcctattttgttttgtttttctgaaagaccaaamctttcatttggttacccctttcaaaaattttgttttttgtttttctttcaactgttgacatactctctctgagacatatggtracatattatttccatggggcatgcctaggcattttgtgggaaattacatgtatttcacagaagtagatgctctttttgaccaatatttttattttaaatgctattaaccaatatgctgttaatattcagcaagagtaatcaagtaactcgtccagtgaagctgatgggattcttgagagagtgcaaggtttccctctctggagaatctgttgaaggagggtttttgcatatatgctggtttaaaggaaatggaggtgttgaactttagaaccatgttgcttatggaaatagcttcgygtagagtaactcttagtccattttgaaaccctcttccctagaaatttctatctctttcatttaatactgtggcaaggttaataatatttacacatactttcttctgtgttgtgagatgttagtttaagttggaacatgctggcttgtcattttctaaagtgaatcagtttatctttggtttagcctgaaattgcagcagagagtacgcatcctcctgggatctgaatgtaaaataactgaaacagattgaagttggcagtgactaatgaagtcttgcgcataagtcggcaagtcagtaggtttctgcgtatcaagaaggaagagcagaggaacccgagcccctggggtctaggcatttcttccttcttccccctgtgcccagctctgatggaggaggggaatttaaccacagatattccacctacattctttctaaagacatcaaattcctagtatacaaattcgttacattactggtaattcccagctagcttccttgtttaacgagccgttttagctgcctaaaggtattctacatagcaattttaatcagtcatataaaattgatgaagctgagataccagggaaaattagaatggttatattgtttctttgataactccttccgcaggctggctacactgttccacctttagtgccctggaaatgactccatgtcaccaatttacatagtaaagaccactttgctcatagctgagtctcagtatgcccagtgaggctttgtgttgttttgttttgtttgtggtcagcattcatatatttccgtacatcactacacatatacacctttacttcagaaaatgccagattaatttctttgtttctttcttgaaatgttttctttttgcacttttttttaaccattaacatggtatcagggatccatagtatcgcgttgtatttacaagattacagaaatacaatctgcttggcacatttagaaatatgttttgaaagaaattggtgtgctgttacccttcggttcagttctcccagcccgttcccacatagagagcaacaagatttgtgttttccagctcattaaactgacagcagaaattagattgtggtattaaaaactaaaaagttaaattacagctacacatgtcctttatgcagtggggcgtgtggaagatgtttgattttaatgtttgctataatggagaatttaaattacaatgtttgtcaaatctctaatctttgttacagagtggaatattaattacgcttttaactatgagaggtaaataaaatgagcatccactgcacgcccagggrtaaattgcagattaccaacaacgtgacataatgcactaaatgtcagttttgtcaaacaaatttagaagaacggttaaactattagcttcctgttgttctagggcctttcttgcagcaagcaactattgggagcagcagggacactgtgccttgtggaagactaagggagttaaattgaataagcaagatgaatggggagacagcaccacagaggcactcaattagtttataactgtctattaacttctgtaggtggttttgaataaacagcagattatctgttgcactcttgggggacaaggggagccatgggagagggtcagtgtagcgctcaaaggaaagagattttttgattctcaattgccctctgtcttctcctttcctacttttgtgcatgaagcatgggtaatggttgtcaaaaccttctacatgtttaaaacttacacgcatacaaaggagcagtgcccgccttgacatttctcttggcagttcttgcatggaacactggtgtgatgcccccaaagaataagttgaatttaggttctttggctactttttcagaacatgttcttgggaaaagagtagtaactcttggttcttagaactcaggaagataaaacctctccatgaatgatcatagccaggatttctttccagagagggctgagagtgtggagggaaactgatggagctctctgcmtcatgcagtacatcctggagacttgcagggcgtgggaagtccccttgcttccagtgaaggcattgtttctagcttcagtgtttatgcaagttctaatctcctgatgcttaccttagagtacatttaggaaccagtgctctgttaatggaaaaactaaattctaaaagatttttaagaggcttattctggccaagcccggtggcttacgcctgtaatcccagcactttgggaggccgagacgggtggatcatgaggtcaggcgatcragaccatcctggctaacatggtgaaaccccgtctctacttaaartacaaaaaattagccgggcgtggtggaggacgcctgtagtcccagctactcgggaggctgaggcaggagaatggcgtgaacccaggaggcagaggttgcagtgagccgagatcaggccactgcactccagcctgggtgacagagcaagagtccatctcaaaaaaaaaaaaacttattctgagtcaatatgagtaaccgtggcccaaggaaaaacagtcttaagagatcctgacaaagtcaagagagtcagattacagttttctacattttggagaggaaggagttacaggcaaagacataaatcaatacatggaagatattgattagtttagcccataaaggtgrgatatcttgaggtggaggcttacaagtcaatagatggattcagagattctttaatttgcaattggttaaaggaacaaaacttggtctaaaaacttggagttagcagaaaggaatgttttaagttaagataagcatgctatgtcagagtcagccacaatatgacctgcttaacaaaagcagtggcttgcaggcatgacttaacccttgccttaggtattgtttataatttgatatatcattaccacaaagagtatgtttagtcaatcttatgatctctattttaacattaatgctggtcaattattgtgcctaaactccaaaagggggcgctataacgaggtgtgtctgacctccccatcacatccaggaactcaggaaaatttttaagatttttctgagttcctcttggctacaagtcagtggggagcttaggattttcttttaccgcatggtacaatcactagatcattataaagaattgcaaattttaatgaaattgctgaagaaacatggtgagaattaaaggggaaggagataaaagattagagatgaaggaaaaaacaagaccaagaagatgtggaaactrtgagtgatgacttccgaactttaaagtatttttagtgcttctgaatttatgtccttcaaactgtgtaccaacttgcttttttgagcatgcagacattacataatgcaagccatttatcagagttcttttacatagcacagaacagtcataagatactcttacttttcaacacacatacacacacatatatcccacaaagggattcattttycttttgctattttgaaaaggctgagaaatgtatgcctccaccagcaggattggggcattctttatgtgaacctgtcccacttaaaaccagttgtcaaggagagaatcaagataaaacacagtgtgtggtgggtggatccactaagtgaggaaagcttattaggaaagagttaggaaagctgtagttcctcctgaataagactcctttgagaaaaagagccaagacttaatctaactcttgggtatctgttttgacacctgtgtctgtaattgctggtttgctttgtaataggggtgttttctttggtcatccattgaattacctttaattcaattaccrttgaattacattgaatcgatgctcttaatacctaagtttyctttgagctaaatgtaagcatttatgtgctgatggatgttattaaaccctacatctcctttataatcattcatgagatccatcagcatgagggcagtttcttcatcaacagactgtacaaaacccttatgaggtaagatctcagtgaacaaaatgagaataatcagatgaaataatagtcaagtgattgcccttgaaaaatagaggcacttgatacaacttagacttgaagtctctttttttttctgtttttcctcccactaaactattgcagatttgacagggtgtttattttgcaaatatgattggagggatttgtcaaggaagactaggatagcaatggtcatgaagaaaagcattatccaaattataacccaaagtttactcacccatttccctgtgttccctggcactttgtggagcctgtattgttgtcgctgtgggggttggtttcacatgccgtctatcccagtacctgtgagtttctcagaggccagggctgtcattgtcaccctgcatcccaagtacctagcccagtgctgagctcacaggggatgcttatgcaatgttgaatggattgttaaaagaaaaatgttagacaaattaaatttaacagagtttaattgagcaaggaaaaatgattagtgaatcaggcagccctcagaataagagcagattcagagagagccaatgctgccatgaggttggagaaaatttatagatagaaaaacgaaagtgacacacagaagacaaaagtgaggtacaacagctccattggttacagcctggcatttgccttgtttgaacagttgtttgcctgtgagtggatgaagtctggtgctgagtttgtctggggctcggctattgttacagaagcacactcctagctcaggttttcagtccgctgatactaaatcaagtttagcctaaaccttcctccttacatattttaattttggcctacagatttccctgtgcatagtgaactgtaacctaaacagactgtaacctaccaatgattgtgattgtgccaatcaccaagtcttggccaaaggtggccaactgctcaaactgggttcaagcaaggcaaataccacactgtacccagttcattgtttctgtacctcacttcagttttctgtatgtacctcacttttctttttctgtccataaattgtctcccaccacgtrgctgcactggagtctctgagcctactttggcttgggaggctgcccaattcaagaatcattctttgctcarttaaactccattamatttaatttggctaaagattttcttttaacactgacctgctaagataagttgtggtttgtccataagaactcaagtatgcaaatatggaggttttttcaggccagattttggttgatttaacagaatgaatactggaaaagacacctttcatgggtatccagatatccaagaagaaatcacagtgctgtttaaaacaaaattaagccattagggaaagtttttgtctcatttttccctcctatctgttgagtccttaccaggtataggaactgtgctttacatgtattctcatttcattttcatcaaccccctacaaagtagatgacatgctttctctgtcaagcatatgaggaaaccaagattttasaaagtttccatctctttcayaaggaaagccggaactgacagagtatgggggctggggacgggatctcttccgattgccatttactcattgaaataagttttcatctgagcggggacagagartggttaatggaggtagaaggaggtaagagaaaagggaaaatcagttttcctaaaatgtaatgtctgtcatattattctcctgctcagcaggactttccttgtctaagaattatgtacccacttctcagctttgcctccaaggcattccacagaatgacaccagggtttcactataggcagcttatgccttatttggttttctaagcattttttgaactgggcatggtggtttgcacctttaatcccagctgatcagaaggctgagacagaaggattgcaagcccaggagttcgagaccagcttgggcaatatagtgagaccccccatctcaaaaatagataaataataggctagtgtggtggctcacacctataatcccaactctytgggaggctgagacgggcagatcaccctgaggtcaggagttcgagaccagcctggtcaacrtkgcgaaaccccgtctctactaagagtacaaaaattagccgggcgtggtggcacatgcctgtagtctcagctactcgagaggcttaggcaggataattgcttgaacctgggaggtggagattacagtgagccrcgatcgcaccactgcactccagcctgggagacagagcgggactctgtctcaaaaataaataaataagtaataaataaaaactggttgactaattataaataaactgaaatgcatagccatgtggtagtaattctaagagtcaagagttaattcttgtgtcttatcaaaatgaaatgttaaggaarcatcaagtcagtggcctaaagttggatagattaacaaaaggcttttctattttctgttcatctaagtcaacctcaaatattacagatattttttaaagaactacttatttttaaaggactaagaattattttcaaagaagtatgtcttcaagcatcatgagcagaatgaaaggcygaatgctctccttgtgacaaagtgagtggacagacccatccgcagtgcagcatgcctatcaccagccaccagcgcagtccaaagttacatgattgaaaaagaaatttgcacctgattgaagatgctttgggctcagttttgctgtcctctccccacagaagtctaagctgttcagactgctcaagataacacttcacacagtttaggaattgtggtttatgtcgaacgccaatctatatcagctttcataacatttaatatggtggggggagtgataggtgtttgagaaattaagcaaaaccataaattttctcttggtatgtatagtatatacaaggagagctttcgagtaccttcttcctagtgttctctcttaactcttgatgtgagtgaaaagcttcatccattgcatgacacagactaggtcattgtgtttgaattccttgggttggggagaagtatggtagagtctttctcctcacttcagaaatcaaaagaaagtacagtacctgcttggtaggtattccttgaaagttgccagcacttttggctagacagctcccagataagcagatggcttctttaatgatgaaaccccacttttctacaatgctaattagttagagaaagataatttgaaagtctgctgtacattgcaggaaatgtcttttgtgtctgtgtcatttgcttctaagaatcatgcaactgccacctgagtaggctccagttttctctttttatttaaatcttgtgactcttcaatcacaagaaaaggggaaagacagtcaatgaggaaaaggagaaccctctttcaggatgaaacactcaattacaagtgcagctatatttctgttttcaaaaatcagccttattgttatgttttgaactatacatttggaacagtctcttcagtggcttcatatggcgtgtgcatctcaattcatttctctacagattgccattgagacttggaaaaaccagattgcccatttgaaagctggttctgactcagcttgtcaagccagccatcctggtcagaatgtattggggaaaaaaatgaataaaagtaacagagacctggatttttattctgatcccacacttgattcatttgtgacccagggcaagtcacataaccttttatatatgattccttatttgttatgtggcataatatggttcatccctaccttacttatttgttgaataaacccttcatcctgtagaattcccccacattccaaactcactgatgcattcttatgctgtcatttaacgcgtccctcagttatctggacttgctgtgaactggggctagcactagaggattaattgattcaactttcttattttggtaagaatttttcataagtagtgttctgtacttcctcttgcattacattaggaagcatataaggctgaacttgattaccgagttgcagttttgccaacctcatccatccattttaaagttccacatcagcccttcacttaatggttttttaagctactggtgatgattgcctgatacattattttattagggatttcaaaatggtgacatcttaattctgtcattccttctgtatttattaagtgtcattctctactcacctgctaggttactgtgaaatgcagttcatataggaaactcaagataaatgtctgaagtttattcttcttatttaccaatttcagaatgagttggtgccttaggattttgtaagatgaccagtagtgtcattatcagtgattttaacatatgtgatatgtttgaatattttagagtaattactgtttggatgttcagagtatctcacctttggccaataggagttcattcaagttgtctcttgtgttttttttttaacataaccccaaaactttggagatcttctggtacaacaggatgttcttagcycatcttctgtattgtctgccccatggctggaatcagtcatttctctaataaaccctggtttcttttactggaaaatggcatttagagaccacaatctgaccacaaggggagctcattgaagtgggtcagccgttgcttctaggctcacatcagccactttcaccatcggtagccctgctgtctgcttacctgacatgccagcagctaactcatcccctttgtctgtgttcactaagcagagaaagaccattggtaaatagtgaaatataagagaatatctttatgacctcagggtagggaacgtcctaaaatcataatagacttaattgatacatttgagtatatcaaaattataaatttctgtataccaaaagataaccataaacaaaatttcaaacaagctatagattaggagaaaacatttctaatacttatatgtcaaagtatcagtagcctaaatataatgaatttgtagacatcaacaaacaataacaacccaatagaaaaagggatataatatataaacagacaactacagaataggaatataggctgaataacatttgaaaagatgtgaaacctcacatataatcaagtatatgcaaatcaacaaattataagatgccatcttttcacccatcagattgaggaacattttctgtaacagatagcaaatgttggcaaatgtgtggttaaaaaaaaatgcatcactccgttaacataacacaactttggtgatgcttttgagacttcattttaatttttgaaaaagcaatcccttctgttccccatcattcccacctagcccccaatatcccccccacacacatacatacaaacacaaataaatagcatgtaaaggccaaatcgtttgctttctacattcttattaacaagtaagaacctttcactaccagtatactcaagttctgcaatatagctagttcatcttgagatctatatctgtgaaacaagaaattcagaatcagakctaaagatttttaaagtgtgatttttatatttttcctaggagaaaarggcattttttacaataaagtgacagttgtttaggataaattaataagaaaatgtaggcccttgttgggaagaattgttgatagatgggtgttttagaaaagccaaatggttagtcaaatgaccacagaaatgcctgtaggaaataaaatattaaaattctgaacactgtttgattatatgccttgtattagtttcctgttcctgctgtaaataaattcctacaaacctagtggcttaaagcaaaataattatcttatagttgagtaggttagaagtctgacacaggttttgcttggctaaagtcaaggtgtcagcagggctgtgttcctttctgggactctaagagagaattcatttcctggccttttttccacttctggagactacccgcattccttggcttgtggccccttcctcatctccaaaggcaggaagggtgggttgagtgctcctcacacccatcattctgacctgctgttttgcctcttaaggtgtcatgtgataacactggcccacttrgataatttaggataatcttccttttttaaagttagcttattagcaacctcaattccaaccacagctttaatttcattttgccaagtaatgtaccagattggtgcaaaagtaattgcgacttttgtcgttacttttaatggcaaaaccacaattacttatgcaccaacctaataaaatatattcacaggtttcgagattagtaggtggaygccttcaggagaccattctgcccagtgaatgggatctgggccctccaaaaagagacatccttttctgggttatcattcatgcacctgaagcaacctcttttagytactgctttccatgccagttrccagggctcctgaacaaacaggaagtatttactcacacataaattaatcagcatctatgtttttaacttggaatagaaaggttttttaaaaaaaattttcatcctttgtgtttatgagatgcttggatacttaattctgcacatccaagggatcacttggattttatgaagtcagtgcttaaagtgggatccagaatatgcaattttatcaggcccccattgtcctatgtgcagacatcagtggcttgccttgtttctattacatagagacattccagaattttttagcgagtttaacaaacatcatcaagaggaaagtggaggtagtgttccaatatgacatgcattaaaaattcttctctttctcacttatatttatagtctgatagaggatcaacagtataccaatttaatcttgctgcagagtgacatttttgaaaccattaaatttccagataatgtgcacatgtggaattcagcagcataagccagctgtgagtggggacccactatcactaatgtcacttgattcccatcttgcttgactatggattgtaccagtttcatatttcttgcactgtcaccggttccagcccctctggattcataytgctgtgatgtgagaaataaaactaaacaaaatattactaaggatgacagatactacatctattatttttatggctgacttatttcagtgtttaaaaatcttcggttggtttggggaatggcgttaggcgctcacgtgagctgtgggttactcccaagtggagggtgttgtttcaggagggatctatttgcaggtggatattggarggcagaatgcctcttatgtgcaggtcttgccacactgtgtgttcagaggagcccagctgaagacacggtggaactgatctgtatggggcactcctgctccaggcccagggactgatagaaaatgagagggaaaggaggaaacagagctcacaagtttttccttggtgggaacgatatctaagggacttagggaaggtgccccagccagatatataatgagagacagtgatgattaagtgcatttcaagatcgacccaaaggcttttttccagggctgttatattgtcatatgaataacattaaattcaagttataaatgaagttgttttaaaatatgtgtatatgtgtgtgtatatgtatttatattcctctttatcatttagaaaaaatcagaaataggctgggtgtggtggctcacacctgtaatcccagcactttgggaggcgaggcaggtggatcacgaggtcaggagatcgagaccatcctggccaacatggtgaaacccaaactctactaaaaaaaaaaaaaaaaatacaaaaattagccaggtgtggtggcatacgcctgtagtcccagctacttgggaggctgaggcaggagaatcgcttgaacctgggaggtggaggttgcagtgagccaagatcacaccaccgcactccagcctggcgacacagcaagactccgtctcaaaagaaaagaaaaagaaaaagaaaaattcagaaattaaaatatatatacctatgaagtggttaggtgttttcaacttccaaggtctttttctttcaacaacttgaaaagtggtagaccataggatcaagccatgaaatgtgagagtcgtcaccaagccctgagctrgaaccttcaggatcattagacatgcatcagtcagtgtccgtctrtctgtctgtcatgcctctctcttatgcacrattatgtttatcatatattttttatgatcaggaagtaaggtattaagattaatcagacaagcagaataagaacaaacaaatgtttggtgagcgcctaccacatgccaggcactttctaacaggagatgttagaacagaagaggcataaagccctgtcctcacccagctggcacgtgatgtttgcccaggagcatagtaaaatacctgttggctaagaacaaaaacagtggcttccaagtacgtaaggataatgcttactaaccagagattcttttgaaattaaagagtaggaaaatgtttccttttgatccattgaacactctacagttagaaaactttaggtactcgtgccctctccagaaagcagcaggctcttttcttaattttttagttctgaaaataaaaattatttaacatataaggatattgggtgtattttttatctcacatgttggtttagcatatgattccttgaaytttgttgccataaataacatcatcatgattcttttgtttattgtaatttaattatcatctcagagtcatgcaagacatttgtgtcatggttttgaggtgatcatagatacatgtaatttcaacttgttttaaaagaaagccaatcttttccaaatatttgattttcaacttgtaagtttgagaaagactaatttttattatatttgtataatatgactattatttgaacctcttcaacatgaagtacacatggttatatatatatgtgtgtatacacacatgtaccaagagatcctgacagttacttgctgaagagatccacacacctctttgcttcttttgctctggtgcaarttcatttgcagacacctttcctcaccagtgactcatcgtgtggtgttgttaccactaggtcatctgaaataaagttgtagcctaaagcgatatgtaaataaaacccatacccgtttctcaattggtgaggtaggaagatacatatccaagtccttctgtctggtttctttttagcctatcagcctttctaagagtccttcagtctgtcatttgatataaccccatggtgtaaagaggtgaactctacaacagaggcccarcaaagataaaaaccctgacttgtcttaaaaaaaactgtttttttgtgataaatgtatgtctgttaactagtgaatgaagaacagagagtggctgggtaggtagtgtgtgccatagtttgttgtctctagagtgggcttcttaagtgatgatacagttagcgatgttagaagaacactttcacctcagtcaacagctataaagtccaagctgggaactttatggacagtgtccagacataagcaaccataagtgtagctagtgatgccaatagattccagattcccaggatcattttatctcaacatgggaaaataatgccagatgtctaaagttctctagccatgtggccatggacagcttagcaccactgtgcctcagtttccttctctggaagatagggataataatggcagtttcctcattgggcttttktaagagttaaacgaattaatgaacataaagtgcctggcatggctaatctgaagccctacataaatttttgtaattactattttcatgttgtatttctgtcaactgttgcagtgctggttcttttgaattggaataattaaatatcagaccactatgtttctttcttaaaattttacctttaaatgcaacaggatctgctaattcttacagatccatctttaatgtgacaacctcttattcattctggtttatttaagtggatcttgtaatttggtataatatatgcattgtttgactaaaccaataataatttcatcccttctttaataaaaaataaacacttattcttgttaccagctcctactgcagcccttaattaagtctaagcacacacgtaattgtagatgccaggaccaaagagccatttaccctttcattcttagtttatatgtgatttacctttccatgagttttgctatccctgtagtatttgaaaaacaccttttctgtggccaacagtgatctttggctcagtgctaataagcatttccccagtgacaatctgttgacataacctagcatggcagggtctatcacagagggtgggggtaatcaggctctggggaaccatggcctgtgaccttgaatggcaatagaccaggactgggaggagcatccatattgaatccactgatacccatggcaracgggcccatccatcctgctcctctcccaattgccactcagtccagtttcagagcgggaaactggaggaggagtgatttcttcttccttccagccaggtggcaatttgttctcctagttggcagcaatttgtcctgcagctctcccataggacacattactgaagagttcattcttcaccatggtttctttatcggttgtgattcatacccatcataaacataataacttgccaagaggtttttcttccatttcccttatttccatttcatacttttaaacatttttactgtagaaaagaaatactcaggaaatagtagagtataataaccattcctttaatttgaattcagcgcgcatttctctcctgtcctacctttattctactttacagtttttgagctatgacagtttttctccctccaattatttttctaaacagtattgcaatgtttaataaactatttttagagcagtttttgtttcaccacataagtgagcagaaaatacggagttcccatatagttctaacacccccctgccaacacacacacacagtatcctcatttatcataatccgtgaggctctattgccacatcattatcaccaaaggctgtagttcacatcagggttcattcttcataatgcacctactatgggtttgacaactctataatgacaggcatccttcattatagtatcatataaataagatcacagcctagaacctcctctgtgctctgcctgtttatccctccctttccgttaacctttgacaatcactaatccttttactgtcttcatagtcttgcctcttccagagtgnnnnnnnnnnnnnnnnnnnnttcatagtcttgcctcttccagagtgttatgtagttggaataataaaatattaggtcagtgcaaaagcaattgcattttttgccattatgtagcctttcagattgacatctttcacttagtgacacacgtttaagtttcctccatgcctgttcatggcttcatagcttattcctttgtaacactgaacaatattccattgtctaaatgtaccacagtttagccattcacctattgaaggacagcttggtttcttccaaattgtcagttatggataaagctatatgaacatctctatggaggttttgtgtgagcataagttttcaaatcctttgggtaaatagcaaggagcataactgctggatcatrtgggaagaatatgttaatgttgtaggaaactgacaaactgtttttcttttttttgagatggagtctcrctctgtcacccagtgacagtgcagtggtacgatcttggctcactgcaatgtccgcctcccaggctcaagccattctcctgcctcagcctcctaagtagcaagtaccagagatggggtttcaccatgttggcaaggctggtctcaaactcctgacctcaaatgatccacccacttttgtgaagctccccacgaccctatattggactgaacaaaagaggacgaacgtgggaatagaagacaaagacaaaagagtatatttggaagaaggggtcagggggcaccttgcttctagtgaacaagggccctgagctgtacacagccttccatatttattaggcaaaagagatagcaaggaggggggtggtggttgtcaggtaattgtcagtcggccatttggttcacagcaggcttgtgagactgcattcctsgaacaatgggtactagatgtctcaggagataacttcaaggagtcccgcaccaggaagtgatggtcctcagcaaaccttttggcgacaggagcagtttgagtttgcccacatcctgcattcatgataaacagtttgctgtttgatcatatagcctccagtggaatgctgagctagtcacaatccctttgccggcacactacacaccttggcctcccagagtgctgggattacaggcgtaagccactgtgcctggcccaaactgtttttcaaagtggctatgtccttttgcattcctatcaacaatgaatgaggagtcttgttgctctatattcttaccagcagttggtgatgtcagtgttttttagattttggccttataacagatgtgtggtggtatcttgttgttctgatttgcattttccttataacatatggtgcagagcatctttttatatgctcgtttgctatgtgtacatctttggtgaggcatcaaggtctctggcccattttttaatcccattgtttgtgttcttattgttcagttttaagagttatttgaacattatggataccagtycattaccaggtatgtcttttacaaatattttctccaagtttatggcttctttcttgacagtgtctttcacagagcaggaatttttattggaaagatgtctatcttatcattttttttcatggattatccctttaatattttaactgaaaagtcattgccatatccaaggtcatctagattttctcctatgttatcttctaggagtttcatagttttgcattttacatttaggtctataatccattttgagttaatttttgtgaagggtgtaaggcctgtgtctagattcatttttctgcatgtggatgtctagttgttccaccaccatttgttgtccattgtagtacccttgcttctttgccagttgatcgtatttatgtaggtttctttctgttctctctcttctgtcctagtgatctgtttgtctcttatttcaccaataccacactgtcttgattactgtagctttatagtaagtctggaagtcaggtagtatcaatcttccaacttttttctaatcagtattgtgttggctattctgggtcttttgcctctccatatagaatcagtttgttattaaccctaaataagtttctaggattttgattaggattgcactgaatctatagatcaatttgggaagaattgacatgtggacaatattaaatctttcatttatttagttctttgatttctttcatcagaattttacagttttcctctatastttttgtacgtatttgttagatttatgcctaattatttcacttttggagatgctaatgtaaatggtattacgtctttaatgtcaaattacagttgctcattgctggtatataggaaagtattgacttttgtatattaacctkgtatcctgcaaccttgctacatttgcttattagtactaggagctaattttgttggttctttcagatttttttacacagacagtcatgtcatctgtgaacaaagagcgtttcattcattccttcttaacctgttgatattttcattttcttgtcttatggcattagctaactgagacttccaagaggatattgaaaagtattggtgagagaggacattctggccttgatcctggtatttgtgggaaagcttttatttttgcaacattaagtataatattagctatagcgttttagtagatcttttttttatcaagttgaggggtgttcccctctattcctactttgctgaaaacatttatcaagactgggtattggattttgtcaactctttttctgcatctattaatatgaccatctgacttttcttccatagcctgtcaatgtgatggattgcattttttgagtttcaaatgttgaaccagcctcccatacctgaaatatattctacttggccatggtgtataattatttttataaattgttggattcaatttgctatactctgttgaagatttttgcatctgttttcatgagaaattatggtttgcagttttctgtttctgtaatgtcttcagttttggtattagggaaatgctggccttttagaatgagctaggaagtattctctatttatgttctgggagacatggtagagaattggtatgattgccttaaatatttggtagaatttaacagtgaaaccatctgagcctggtacttcatgttttgaaaggttattaattattgactcaattttttaatagctataggcctagtgagattgtgtgtttcttcttgtgtgagttttggcagattacacctttcaaggaactggtctatttcaaccaggtcatcaaatttgtaggtatagagttgttcgtaatattctttattatccttttaatgtccatgggatctgtaataatgtcccctctttcatttctaatatgagtaatctgtgtcttcttttttttttttttttgtttagcctggctagaggtgtatcaattttactaatcttttcaaccagtttttagttttgttaatttttttctattgacttcttgtttctgtttcattgatttctgcactaatttttttttattttcttctaccttctttagatttaattttatcttcttattttagattccgtaggtgggagcttagattattggttttagatgtttctttttgtctaatatgtgcatccagtgctacaaatttcactctaagcacctcttttgctacataccacaaattttgataagttgtattttaattttcatttggttcaaaatattttttaaatttctcttgagattttcttttttgacctgtgttttacttaacatgcatcttttatcttccaagtattagggatttttccagccattttcatgttactgatttctaatttaattccattgtagtctaacagcagacaccgtatgatttctaatctttttaatttgttaagctgtgtttaatggctcatgatgcggtctatctggtgaatgtaccctgtgarcttgaatataatgtgtattctgctgctggtggatgaaggattcttaagatgtcagtaatatccagttgattgatggtgctcttgaattcarccatgtccttactgattttctgcctgctgagctgtccattactgacagaggggttgaaatctccaactatagtagtggattcatctatttctccttgcagttctatcaccttttgcctcatatattttgacactatggtataggtgcatacacgttaaaaaattttatgtcttcttgaagaattgacccttttatccttatgtaatgcttttctttatccctggtaattgtttttgctctaaagtctgctctgtctgaatttaatacagcttattccagttttcctttgattagtgttagcatggtacatttttctccatctctttacttttaatctatgtgtctttatatttaaataagtttcttgtagatcatatgtagttgagttgtgtgttttaatctgataatctgccttttaattggtttattttttatttatttttttgagatggggtcttgctatgttgcccaggctggagtgaattggtgcaatcttggttcgctgcaacctctgcctcctgagttcaagcaatcctcccagctcagcctcccgagtatttgtgactatgggtgtgtgccactatgtctggttaatttttgtatttttggtagagacagggtttcaccatgttgcccagggtggtcttgaacccctgagctcaagcagtccacctgcctctgcttcccaaagtgctgagattataggtgtgagccacctagtgcatagcctaacgggtatatttagactactgacatttacatgattattgataacattggatatctttttttattactgttttctatttgttgctcttattctttctttgttcctgttcttttactgccttttttggttttaatggagcattttatattatcccattttgtcttctttattagtttaatgttttgttacttttttcagtggttgccctagagttcacatacgtttacagctagtccaagtctactttcaaataacactgtaccacttcacaggtagtgaaagttcttataatagcaaagtattccattttcctctcctgtcccttatcttattgctgttactcatttcacttgtctatagctataatcatcaaatactttgttgctgttattattttgaacaaacttctttctgctatatcaattaagaattttaaaaaatgttttattttacttttactaattccttctctcatgttcttcctttctctttgtagctccaagtttctgatctatcatttttcttctctctgaagaactttttaatattttgtagaaggcagatctgctggcaactgattccctcaattttttttttttttttttttttttctgagacagagtttcgctcttgttgcccaggctgcagtgcaatggcacgatctcagctcactgcaacctcaacctcccgggttcaagcgattctcctgcctcagccttctgagtagctgagattacaagcatgygccaccatgcccggctaattgtatttttagtagagatggggtttcaccatgttggttaggctggtctyacactcctaacttcaagctatctgcccacctcggcctcccaaagtgctrggattacaggtgtgagccaccgcacctggcccagattccctcaatttgtatttgagaaagtctttgtttttccttcacttttgagggataaattcacaggacacagaattctaggttggtggctttttccttcaacataatgaatatttcacttcactttgttcttgtttgaatggtttctgaggagaagtgcaatgtaattcttatcctcrctcctctgtaagtaamgtgttttccccccttggattttttttaagactttatctttgtctgcaatttgaatatgatattactaggtgtagattttttggcatttatcctgcttggtgttctttgagcttcctggatctgtggtttcataaaattagaaatcagtaatagaaaaataactggaaaaatccaaaatgtttggaagataaatgacatgctttaaacattagttttargaaatagttattattgcttcaaatatttcttctgttcctttctcctccttcttgtattcccattacatgtaagttacaccttttgtagttgccycatggttttgggatattctgacattttgtrtgtttttgtttttgtttttgtcttttttctcttttcagttttggaggtttttaytgagataatcttcaagctcagagattcttttctcaaccatttccagtctgctaatgaactatcacaggcgttttcattctgttacaacgttttttgtctctagcgtttcttttttggctttcttagaatttccatctctctgcttacattacctatctgttcttgcatgctatctactttatcaattagacattagagctcrtagcatactaatcgtggttgttttaaattcccactctgttaattccaacgcctctgccatatcagagtctggttttgttgtttgctctgtctcttcacactgttttgtgtkttttttttttttttttktttttttttttkgcgaagctacacatggtgtattgagtaacaggaactgtggtaaataggcctttagtaacatggtgtaaggtgtggggggaggggaggcactctgtagtcatatgattaggtcttagtctatagtgaacctgtgcctctggactgtggacttcacaaatacttctcattattcctctcccccaccgttagttgggataggatggctaacgtgggatggagttgtatttcttcccccaggtcagttaggctctgacaaaagtctggcaggttaggtactggtaaacatagcttctcttttttttttttaatttaattttattattattatactttaagttttagggtacatgtgcacaatgtgcaggttagttacatatgtatacatgtgccatgctggtgtgctgcacccattaactcgtcatttaacatnnnnnnnnnnnnnnnnnnnnatttagcattaggtatatctcctaatgctatccctcccccctccccccaccccacaagagtccccagagtgtgatgttccccttcctgtctccatgtgttctcattgttcatttcccacctatgagtgagaatatgcggtgtttggttttttgttcttgcgatagtttactgagaatgatgatttccaatttcatccatgtcacatagcttctcttaagagcaggctttgttaagaacagaacaaacctgctgactgctgatgtatttcagagtggctacttaccagtgcttcttgctggaggcctgaggggatttgtctcaaatcttctctgtgaaaacctggtagggttcctggaggtaaaactcacaaaactgtgtgagcccccttaaaactaattccccctggagtttttacctctaagatgtgtccacactgagctccagcagtttgtcagctacagtttaggttttcctggctaggttctggctctcacagaggtttctgttcatgaagttcagctccagtaagttgtgattctctgtatttaccttttggtctctccaatttggggggcagtggtttgccctgtagcctcagttctccaacaaatctaagaaaagttattaattttcagttttttcagctttgacttactgttaggaaaaagttatgacttccaaactcctttcatgccaggctagaaaccaccaagtcctttctttaaattttaatgatctatttatagatattcgtaagaacctttaatttaattactaagggcctttgagattcatgcagtgcaagtttggagattggagattaaaatattttcggcaaaccatttgttgtaaatcaaaatggaaaataaatttacttgtgtctttacataagattgcaaagaaaattgtttcaactttagttttcctacacaaaagactttgtttcattaagttcacaaagcttttctgatartgttccaagttttcacttgaaaaaagtaaggtctgaaacgggaggctcaaaagagggagaaagaaaaagagagaaacaaactattacttatygacaatcctaacagagtctctttcttgatgtaaccctttcagccatctgtagttatggacaaaagcatttgacctgtacaggcatacattgatttactgtgcttcactttatggctcttttgggtatattgtatttttaatcaattgaaaggctactggggaggctgaggtaggagaatggcgtgaactcaggaggcagagcttatagtgagccgagatcgcaccactgcactccagcctgggtgacagagcaagactctgtctcaaaaataaagagagagagagagagnnnnnnnnnnnnnnnnnnnnnnnnnnnnnnnnnnnnnnnnnnnnnnnnnnnnnnnnnnnnnnnnnnnnnnnnnnnnnnnnnnnnnnnnnnnnnnnnnnnnnnnnnnnnnnnnnnnnnnnnnnnnnnnnnnnnnnnnnnnnnnnnnnnnnnnnnnnnnnnnnnnnnnnngaaggaaggaaggaaagaaggaaagaaagaaagaaattgaaagtttgtggcaacctgcatggagagagagagagagggagggagagagagagagagagagagagaaacaaagaaagaaaaagaaagagagaaagaaagaaagaaggaaagaagagaaagaaagaaattgaaagtttgtggcaacccgcgagggagggagggagagagagagggagagagagagagagagagagagagaaagaaagaaagaaaagaaagaaagaaagaaattgaaagtttgtggcaaccctcatggagcaggtctgtcagcaccgtttttcctacagcatgtgctcactttctgtccctgtgtcaacagctttgtgtaaagcattggctaggcacttttaaactttttcaaagcatattgaacttgggggtgatagatgatgtatatttgaaagcaatttggtggccaggcgcagtggctcatgcctgtaatcccagtactttgggaggccgaggcgagcggatcacctgaggtcaggagtttgagacgagcctggccaacatggcgaaaccccacctctactaaaaatacaaaaatacaaaaaaattagctgggtgtggtggctcacacctgtagtctcaactacttgttaggctgaggcacgagaatcacttgaacctgggtggcggaggttgcagtgagtcaagattgtgccactgcactccagcctgggatgacaaaatgagactctgtctcaacaaaaaataaaaaattaaaattaaaaattaaagaaaatgaaagcaatttggtgataattatattataacttccttcagttccaatacaatgacatttccaaagtgctgttattgatgaaaaacaaaagtgcccacaaacatgctttatttgggctgtgtagtgatttatttttaaatttgaattatttgacaacacgtaaaaattaagagttgatataaagtcgggtctagtttctcctgaaacttgaaatgacttgaacctccatggggcatcannnnnnnnnnnnnnnnnnnnnnnnnnnnnnnnnnnnnnnnnnnnnnnnnnnnnnnnnnnnnnnnnnnnnnnnnnnnnnnnnnnnnnnnnnnnnnnnnnnnnnnnnnnnnnnnnnnnnnnnnnnnnnnnnnnnnnnnnnnnnnnnnnnnnnnnnnnnnnnnnnnnnnnnnnnnnnnnnnnnnnnnnnnnnnnaactgggtttagaggtggttcacagacatacagtatgtcctatggatatgagcttaatgttgtggtgtctgcctggacctctgtttgatttgagcatgctctcacagtctttacagggcttcttttgtgcttaaagatcagcaattaagtgatgagtgtgacatcactgaaattagtttatgcacgtggaggattagaagggagaaagaatttttccagtacaagcatagcttttattggcacatatatccctcccagccaaccacacaagaagcacagtacctgtcatttcctaacctttaggattagaggaattcaagcaagaaaaggcaaagaggaaagcctagtaaagttcacaatgcttctctttataggcagaacaaaaaagaatattgaggcaattactggcataaatcagtccaaagcaaatcaaagaaattcaagcaaaaagaaggcattttgcytgaattatggagctaatgatctcagtcctccacttcagtgttcctgaggagacmtggcctgagaatgtttttccagtgatctggcagattcagaagtgaagagaaaatgtattattgtaagtgcagctatggagatggagtccagtgctgcctctgtccagaacatgtgttgagaacacccaggctcaactagcatggctagctgggaggagagaggctctagaagggatgatcatgatccccacggggcaagagaggggtggtgtcrgtgcccagaggagtcatgctggctcatctttcaaaatctttgtagctttaacactgtcagagatgttataagtaattttcatttttctgtttaaaaatatgtctcttttctaacagcttttagcaataaaaaggcaacttattaatgaaacccttctgccttcaaagtatgaaattaaaatattattgtaactacaggcaagaaagcatttggattatgtgtcatttagaaatggtaataaagattatccgtatggtcttatgttgtcagtgccttacattgcattagcaatcacctaatatgagtgtgattttgattatgtggttcattttaaattctgtgtcctaggtcaatcagtgtcaagatgatttactagaaggaggtgcggttttctttcatagatgctgttaagtgcttgggcacaattagaatattttagggcatagtatatttggtattatcgtgctgtgggtgttcttaaaccttctcactgtataccttctccttaggcatctctaattctcatcttgtctgtcttgggtacacaaaacaatctctggtagcaagatctataaaaatttgtgttacctgtttatttatgttagtttccctttargtcttctggcttttgtacaggtgtcagtcattttagatgttgagtttttgatggtcagygagcaggatgcagaggccaggattaacctatgtctccaaaagaattagaaatctctctgcttttttttcattctcttccactgaaagagggaacaaagaagccttactcctgctgaacgttgcagggaacccagcgacatgacattttttaaccttctgctctgtaggggttgacaaaacttgatgggaactaatctgggttcatttgggatttgggacagggtcatagccttttgagaattcagtaccttccccttgatcctcctacagcctgagctctctgagctttgtaggttctgtgtcagkttctgctccctgtatgaacatactccaattatacgttcttgactcctcacctagttctgttctttagttttaacaatgtgccttttagattcatctgttatttcatttttgcttggaaaatatttactcaagggagtcttctctttgacactgtatatggtgatgttgacaataatttcgtaaaaacttagtaactctaggagtgtaacaattagattatgattgtgttgtactagaatcattggtcattttaatctagcttataataggagaaacagtgttttaggctgtggtgttttatctttctggttgtttggggttttttattttgttttgttttttgaggatagacagtacctgtttttcatctctgtgtctgcagcctggcagagtgcttgccacaaataaggcactatacatccatctctgaatgaataggattaattcagtagatgttattcctgaacatctgtcaatatacatgccaaagctctgtatcccgttcaaatgcatgcctacataattgaattctttatcctaaggaaactggccaagaagcggaaagagaccatgagcagcacccgacaggagatgactgtgatggtgaactcaatggacaagagctatgctgagcagggcacaaactgcgacgaggctttctcattcatggacacgcacaatctgaatgggagatgtaagtgcatatgtttcttggcttctaacacatctccttggttttgcaagattccaggtggtactaggggatttcaaaaaaaaaaaaaagcttcctgaagaaatttttatgccgtgttggtttcttcartcattttcagtgatcctttgtgccacaggttgcttagcagagatgttctaaaggtgataggaccagatcagagagtccagaaaaccacagtgcagtttctgtaaagatttagagagcagtgacacgaggctttccttcttttraggaagaaggcacctgcttctcatcatccttcttgttgtttagatcccatttgtaaactatccaggtgtggaattacacatgggaagcctgttataaaaacagttcactaaatggcagtaacaagttaattgtttatttgtttagatgacaggttctgcctttattatagggctgtcagtgtcaattaataaattaaactctatttcagcttcacaagtcttatgcttcataccaggtgtgtaaaccaacctcagctactgccttcccatactactacctgtgatccaggtagaaggcattattttaggaaactaacaattagattgattatatcaagcacaaaaggagtagttgctttgtccctggtaatctcggagaccagagggagatacctcrctctgtggtttagggcacactttggtgagttcaaggtcgggggtttctttactgtgtgaaatctgtgcctcaggcctgagctgcataaccaggattctggtcagcatggggatggaattaaagtgcagctattcctgttacaaaaaaataatcgtagtattttaaaggccggtgggccttgtggctgtgaggagcacagaaatggcatctggcgtggggcgactgggagcagtttggacggtgtgggctcatgtcctaatacccactgtggtcagtgtggtactgcagctcccctccactcctcctcttccagatcacagtgtggtcaatgcacgtgcctgtccctgagctttgcgtttctcgtacacgcggctgagctccgaattcagtcttacatttttctgcttgtagcggctgcagttgtcccacttcatcctcctccatcagtttgtactacacacacacatggcccagtggagcatgcacaggtgctgctttggcaccaatgggcagggcagcactgttgctttcatccttgatcttctttctttaccctttcctgtcattttcagtgcaggaaatagaagctatggggtctcagtgtacccaagctccttcccattttttcatagagttctctctgctttttttgtggcagatataatgtttttcatttaaaaatatgtatgtataatttatttaactgccataagaaagcaacctatgatgcattcgttgtgggctggaattggagaagcccttttggccacacacaggattagaatttttgtagtagcaggtattccttgaaggggaccacacagatacatcttcattttgcagtataacccattaacgttccaaatcttctatttcatggtgaaattcctcaagaatcaatttacttagaatcactcatcccaaaagcaagaatcttctttagtagttctaggtgtttgaagtttgaacaacaagaatattcacttctggacaggaagtttaatttggcagttacttttttgaaagtgaatgtatctgtggaaatccaaaaatgttcatgtacaaacggcagctgcagaggccaacggagcttccacaactgatcggctattagacgttattttttgccttccttcaataaagccaacagaaggaacacagcagtagactttccattttcctcccactctgagcaatgagttctcatcagatctcatctgataggagcgaccctagaggtagatatcataatactgtcttgatgtctttgaaataagacagcagtttctggggaggaaaccttcaggaaagatgttccttagaccacaaggctgccagcaccacacctatgacaagtgtgggtatgcatgagctctttcagggttgggagaaagtgctggaagttgtgaagtgagcagtttttagaaatgagacaaggggaaaaacgaaataggagaatttaaaaataagcatgaccacagttatgagaatggggattaatctctccagcaaagcaagtatgagttgcactatctgctttaatatgctataaaaaggggagaatagatacaggtagtgggaatgggtttagtttttatgctagaagatgaaaatatttttaaaatattttgacaggaaggtgaagataaacacagttattttatatctgctgtgcacatctttaccaaccacataaaaatgtctgcagctaataaaaaggctttattctcactgaccctggcatattttattggtactcatttttttcattcttattttcatccattgtgctctttttccaggcttcttaccataaacatgcgttgtaagtgtgatacatttctattttgtaaaaatacctgtaaatgacaggcagcctgagttctggtctttgttctgtcacgtactgattctacactttaaaaatataaacacaggtaaatgcactctcctaaacggactgctcctggagagttaaaatatattaatatgtcatcagaataattacccagtatgcacagggatttggtcatgcttcccataaatataatggtataattgtgtcttagtgtcctgatgaggaacttagcatcaaacagatcatgtaactacatcagaggagttacaatttagacttaagtttaaccaccttgagcaactttcaagtctttatactttaatgaaattaaactgttttaaaaacactaatcaattaatacatttgaagaggttttttttacttaaaaaaattattctatcaaggctctgtcatccatgaagagcgttttaaaatgtctcttaaaattaggaaatacccatttttaatgaaatcagataaattggatgggattgactatcctgcttgataaaagrgaggaagagaaggtgcaataattcagtcttgagtgtttcagaggaatattttaaagaagagcatttttgtaaggatttaaaatactaaggaacacgcatggagcaccacctttgtttttcataaagcattgtggagtattctctgcatatccaaatatgagcaaggagaggatttagcaaactacgggaacattgacattgggaatcgtctccaaaagccatgtgtagacaccttcttctacttttacttgtaaaattcagcttggcctgagagcagatttctataagcaaagggcagaagtcaaaatagaagtctgatgaatttctctatccaaaatggtggctgtggttgtgggctttctctttatttgtggggtaagaaaagtctttaagtgacgaaaggttgcttgtcttctaaaggataagtaagtactcagaaacaactgggaatgatgatatttcccacatagacatcagtgagtcccggagtcaccgtgggtagcatggagtcaccatgggtggtctcagagcattgtgtgttcagagtgtattacctctctgctgcccctgaccagcctctcttttatttacagctgtgtcttcaccatcgtccttcacaatgaaaacaaatacactgagcacatcggtgcctaattcctattacccaggtaacagttttttccattgtctcctctctgctctctcctcagcagtcrgaatcactccgccctctctctgctatccctggtgcttgaggggcttactgtgtttgagatgttgtaacccaatgcktttctacagctttctatgcagaaaataggggtgggcattcatcaatcatttactgttctttctctttttactttctctgcattgacctgcttacggtgtatgacagacccatttgtgccaactgcaattttaggtgagaacatttccctttaccacagtttattgcaggagtaatttagaaagtcagtgaccactctgtaggagattggagttttaattctgtataatgcagtgattataagcacgacatgtgggaggtgggtggcctgggtcatggggttaaaggaaaaagagacttttctctaaacagtcgccattaataagaggggtttgctgcatgtatcttggggatgataccaacaggttcaaatgaacaatctcagccccaatattctccctttctgtgttcagaatttaaagttaggtctgatcccaggggaaaaaaacaaggtgtcatcactcagctgtgtactttccaagagctgaattctgtctagtgtgatagtcataaaagtgaaaatagcttctcattattttcacttattgctaagcactaaaaacttcaattttaaaagtagcgtttttctaattatgccaaatgtcatgcagaaaaatgatcacaatggacttctggccctctacccatcctcggtgccactcagggcaccccacccccccaccaacattccaaagtgtctgtcacacagtggaatttcaaaggagctgatgatctgaacagcaaaatgacaagatggcacttataatcatatgctttattatgtgtcagatgtcactagaaatgaactaaggtgttagcccggtgggrcagaatgcatttaaagtatgaaatattcccagcagggggttacagaaaaagtcccgtttgtccaatataagaagggtgaggagaaaaatggcattacctggctgtgataaccaaacaagcatgagctgctgttgcatttgagacgcataaataacctgagtgtatcacggctgtgttctctttctactactaacctttccgaaaaggagcacaacaaaaacgacttcaaggtatataacaattcattgtagcaagagttccaccctcagttgttcgacttctccttcctaattcacttgacaagggtttatatctttccaacatgatttttcccccctctgcttctcttttctctaagttgttacgatttttgtatagaaggtaatttttattttcctaatggtgttctgtgggcttaagcaagtttgttgcctaaggaaaaaatgaattaagatagaactttaagaatggatataaaacagagtttttaaattttgcatcattctgagggctaacaaagcccactaaaccctccctgcccacacacttttaataccaattaaaaggggaagaaaattgcattttattcttttcataagtgaggggcacaggctaatcttaggcaccagaacaatgtaatctacatacaaatgacatttgcagaatcttttgataggcgaagatttgcgatttcttcatgtrctgtggcattcattctgaggttcctctagtagattttctgaccttgggggagccgtgagtggggagggctaaaacgtgccttgtcagaaggaagaaaatgttcagatttcacagcagggttaagacaagcttattaaacaaatatcattctttaaagtcgctgctttgttattatgaacattaatgacatcttttaaagttgattagttttctttactgaaagggaatcacttggacagacaattcaagtagcaaaaatgatgcacattgtaaaaaataagtcacccagatagaccaataactgttatcatgtatggcttatataggtaccaaatggtagtacttgggaactgcattccttacacgttacttggtgcaaatgtgaatctatgtattgagtaacaaggattggtgaggttagcacttgaaaccacggaagaatttaagatatatatatctactctggcagttttgggggatagtagcagttataatttacacaaagacaacaagaaatgtcttgctgtgagtcagagctcagcacaattaaattctctggcaccttcagctccacctctctcatgctaagatgcccagccctaatgtatagagctggagtatatctttacttcatttgcttgcaaaaatgtagatgattaaatggatggttggatagctggatggatggatggatggatggatcgatagatagacagacagaacctaccctacctcaaatatattgcatccatttcaacttaaggtttttcagctagtttgttaaaaattcaagataattcataaagaatataagtagaactaattttcagttcttagaaaaccatcaaaactattagtgagaagctttgtttctttatttctaatgtgctcttctgcattatttttaattaaaaaaaatgttgaggccaggcactatatagtgcaagcatgtaatcccagcactttgggaggccaaggcaggaagatcgcttgaggccaggagttcaagaccagcctccgcaacataaggagacccccatctcttcaaataataataataataataaattagccaggcatggtggaacacacctgtattcccagctactcaagaggctgaggcaggaggattgctggagcccaggagtttggggctgcagtgagctatgatagagccactgccctccagcctggatgatggagaaagaccctgtctccaaaaaaaaaaaaagtagaaaaaaaaattgttgatgggtaatttttaaacacataaaggaaattaatgacaagtaatatattttatcaataataattcttttttaagttagagaagattaatcactaattttagtggaatcaagaatgtctagtagtataagtgacccaatttcatagcagcacacaagaagccttctattccctcttccatatgcatgtactagataatagggctcttctttcatggacttggtggtgtttaaatgcttgaagacgtgttccacactagtaatgagggcaagatggcataatgcagcacaggatgattacatacaacagtgacagttgatgtagctctatggatttaaaacttccaagaatacctagccctgggatcagagcattgctaggttgctggtgtatccacgtgaaggacccagatcacttctgggaagtttagaaggtcagcccaccatggagggcatgttaattatgttcatcccataagatacaaaactgagagaacgagagaggcacagaggggaaactaattaatgttccatttattttagtataaagaacagaacttcctgctggagtggctcaaagctcaagggattcggtacttcagcagggttcctgtatcccagtttataaagcttggcagttgccagcaagcaaatctgatgtgaaaatttccaggtttatttgtgactgttaaaatgggaacatgtgacttgctaaatttcaaagcaaatccaaatgaaacaaaaatcataaaatcaacttaccacccttttttattttgtctttgtgtctttagccacgttgtagtgatccaggtgccatttcagcaacagcaacatagctacacacttgtgtaccacctttcataccatgcatccccaggtgctttgcgatgcagatagaagtgaggttcccaaaccaggccctgctcatcaagcacccttggactaaattttcttcagagctgaacttctccgtaaaaaataaataacatatgaataactatagctgaattccctattgatatacaatctggtaatttttaaaacttgaatatatcttttatatgttttatataacattctcattttaagtgactttagcattatattttgacarcacccatcctcaatcataaaactgctaaagggattcagcattataatgagttaacctgtagaatgtggaattcttaatctaatagcatttccctgcataagacatttttaataggtaccatttctgcagttcattaacctaattttctagtaggcctccattaaaatagagcctctttaggcttctttgaccaaattttgacattaattttatagtacaatttggttgacttgttcaagaaatttaaatgagaaaatgtgttgaatacaaataagacttatttagacattacttggttcatgggggatgaaaagcaattatgatgctaattttaacctcctttttgttatggagtacttaaattcaatgcctccatcctaacgtgatggaagaattgaggcttcgccctctgaccacctctgaatagaaaacttaactggaaagttaaagcataaaataaaaactacctgtaattatgcacgcagtactattgcttatgccctgtttcctttttctcctccttttttctcctgatatgtatcttcttaaaagtgccaataaatggtaagttccccgattcgccccatggaagagttgtggagggagtgggagtgtgtgtcttactggtagattctgacaaagccagctggtgctgctctgtgctggcctgcatgtttgcctttgtagaacattccatgtgtgatgtgttggtccacaacattttgtcaagctttctgataccagagcatgcaaagtgattcatcaaaatgttatccccaaaccaggttcccttttatttttccattcttctttgatttcatgtattaagtccccatttccattgctagctttataagccacaccattttgtgcacttttattttgctcacagaacatttgtgcagagtttatttatgtcatcatacgaactactgaactaatgtttcaaagaatacaagactggttttgcaccaggtcttgatgaagtttcaggttgaaactttcacaaactttagcactggaaggctaaagggctcttctcaattagctttgtgaaagcaatatatcgtttggactgctttgtaaaagaaagatttctgcgcattcttatcagtattgccaaccccatttaaatttctaaacatttaacttttcttttttgctgagccatcgtagggaattttgcamccctaggtgaggggatgccaggagccagcttcttagcattctcagtgatgccgacctagctccctggctctccctcattttctccctggccttcttttcctagatgaaacccacacaatggccagcgataccagcagcctggtgcagtcccatacttacaagaagcgagagccggccgacgtgccctatcagactgggcagctccaccccgccatccgggtggcagacctccttcagcacatcacacagatgaagtgtgcggagggctacggcttcaaggaggaatacgaggtgagcacaagctctgtgccagggctttcccattccttcttggattccatgccaggtactgtgctcccaactcaatcagaaagccagagaaaaccccctgccccgagagatgccagaaagagatgaagtacagttgtccctcagtattctgggggattggttccaggaccccagtatatgtccaagtcccggtgtgagccctgtgaaacctgagaatccaaaaatccagtcctccagatccatgggttttgcatctcaaagatattatatatattcttttcaatcctcatttgattgaatctgcgggtgcagaatgctaggatatcaaggccgactgtattttatccgtggatccactttcatctgatagtaaaacttgttaccaagaagttcacatgcgttacatggaaaaaggaagaatgctttgccttttaccttattctgcacaaatacacaatgaaaacaaatttaccagggtctcttcccctccccatcctgttttttttccctttttttcttcttccctctggcagaattaagttttagttcatgtctccctccccattcttgatcacctttcttggcttttcctgtaattatgatatgaaatcctaatgattttgtagtcattatctnnnnnnnnnnnnnnnnnnnnaactgtccacttaaagcaattatagaccaaccagcaatgtcatgtggtggagatcagacagcagtacagggactggctattgtcatggcagtgacagctgttactgtccagccagcccagagagcatgccactgtcttgggctcttgtgtgggcagctgtcagggacatttctgggaataatgatattctccgaatacataaaatacagggcttacccctttcacaccctgtgccattagttaattctgtcagaaggtcattcaagaattgaagagaattaattgattgaagaaatctaattcaaagaagcatgccatcccttgagtgggtggtgtggggcccagggagcaggacaggaaagttggattgcttttttatgttattaaaatcagtccgcagtcattgatgaagttaaagtagcatgcttactcagagtaaaaataggattatgtagacatgtggtttttttaaaccttagaatgtggttctggtctcatattcacctaactagctcagagttgggaaacatcttgtctggaattagagtgtttttgaaatctgtttctaccacctggatagtctgtgagtttccaactctgtttcttctcttcctgtgggcacactcacaacacttcattttatgccccagacactgcattgtcttgggtttagctctttttccaagcttgatcatcagagattcattacagcagtcaaagcaacacatggtaccactgttggcggagcctgtgctacacttcttttaggaataaggctttggtccaaagcagacatagacacactttgctctgctaacatgtgcatcctggtgtattgccaatgacctcagttcagaagactgtgaagccaaacaatcccatccagaccgtgctccagggtttaattgaagtccagaaaatattttcagttgaagttctgccttttagcaaccctgaaattcttagatttatctttagcaattcaatgtgtaaattcagtgaaattgactgcctttgcatatttcctcatgcacttttaaagtctagcttaggaattaataggattaagagtaagacttccaaaagcttaatatcgtatgaaagacaaaattaggttattgaaaaaatataagcctaatgaatagggatgatgtctaggttctatccaatattctgaatgcagatattactgaaatgtttattaaagatgttaaagagattagttttaggctcaaataacaattcatgaaataacctgagcccarttttccatggactatttaaaaatacctacttcctataacatgctacagacaatgcatatttgaaagatgtagaaaatatttcccattcagatcttttgaataaatatgatttataagtataaactgaaatattatatactaatttgaaccatattatgactgacaactaattcagttctcaaaataaagtgttgtattcattaagtacattgcagaaaactttttctcattttagctattccgtggtcagagaggactgccaaaaagtgaatacttttaaaccctaaagccattgttcatttaaaaaaaaagaaggaaaggaaataatgaacaaaacacatatactagagatgatatcaggaacaaataggaaggagatattgggagaagtatgaaatgggcagttctgttaggaataatcccgtcactgagtaccgtgccccttgtgctgccctcctggagggatgctgatgttgtcgtctagtggggtagatgacagggaagtgaggagtggtgatggtgggcgggcatgcctgtgccatggccgcagggagaaggggacgccccctaagaagcgtgtgtcakggaatgacatgctctggtcttgatggaggcacagccaggcttctgggaactggtggtggagtgaaaggtcccagactgcaggtactcatatgtcccactttctctaaccccagggaggtgttattctcatgagaatctggcaaatccttaaacagttatttttttgaagtttatgtagtttttagacctctaataaaacagacctctttccatcatgctgtaaagtctgcatccttttcattaacacccacccagagtcaagagtgttgagtgctaactggtgtagtgggagtctctgtgctattcagtgaggccatcccacccaacagatactgagaggctgtggtttggaacacaggctctggcacccgactgcctgtattcaaactcagctctgcttcttagctgtgtgaccttcggcaagttatctaacctctctgggcctcagtttccaaatctataaatagaataattatagtctcaacctcaaaaggttgttgtgaggagtaaatcattttaatgtaggtgctagaattatatctggcatatagtaagtgttcatttgaagtgttaggtagtagaagaaaaaaaatactaatgtataataagaccaagagcagaagttgacaccatgttctttatagggaaacttcgttatactgaggtttcagtaaaactctcatctcttgcgcatagcagtctgaggatagagtgagccacatgttatggaaaggggttatacttttccttcatctccagggctggataactttcttaccatgtaccatatatcatcaaaaattcccgttaacaagtaacttacacataaataggtagacttgattctatggattaagagtttaagaactgagaaaataaattttaagaaatatatgctgtcatgttttattgctataatagtatttccatatctaagttggagagtcctaaggaatactataactctagactgcataatcctcctaaaaaattattggttgctgcattggtgtctttggcaaagtaggatttggggaagagtttaattttaccaatcatacactgtacatggcgccagggatacagagaggagaactgcttctccgctgtcccctggggaagctgacagggcaggagaaggcagccaggtaatgactgtagtttgtccagtcaaaccccacaccctctaagagagatgcgcaggcatactctgaaggccagtggggtcacctgagccagccaagagcaaggatgacttctctcttggaagatgagtgggagctgaccaagagaaggtgaaagagggtagccatccaggtagacccaaaagcaggagaatggggttctctgaggaaatggcaggagttctatatgcctgagtcccaggacgggctggtctgtgggatgagggtggtcagggctccaatcaccaaaagcacctcctgtgtcacactgagaggtttggacatcattatagaagtagtaaaagagaagaaagactcaaatagcctgagtctcattcctgtacttggatggagagctatttagtctgaacagctcaattttaaaatattatttgtatgaggcacacaggcaatgcttaaaaggtaataccccaaaaaagtaaaggagaaagggaatgtgtatttactttaaaagttcctgttgttctatctctattcaaaaatgccgtggaatgcttggcttcaagacttgttgaagcagtgaattacttcagtactgaagcatctttggggataaaatctaaagaatggctctggttgttgctgtgactctgtgtaatcatcccatcggcctttctggtcttcttcaatctgtatattatcaggaaaagccagtcatttatgttgtaaaatttttttgaagtagtgatgttctctytgctgaacaggtttcaaccaattcttctttatcgttttcaagacagcagtgtctcaaaattggcctaaacaccagaaggattcattactgatcaagtagccgacagaagtatgtccgaacaagagcataccatgtggtggggatgagatggagcagagctcagtgcaggttttttatttgattttgttctaacaaggtagtcatatggcacctctcaccagggagatgcaataatttgattcaaaagaaactcagacatgaatcacaataaagaagtaaacatgctgaattgaacagaaaatggcatgttgtcaacagagagtggtgcagggacctctccaggagaggagaaagagcagaaagggcaagtttgtttatgttgctgtgagagaagagctgcctggttcctctgacaagcaaagggcagtctgtgctaagcctctggggggaacctttgggcttcccagaaaagtagaagagagarcgcttcactcacgagggacagacaggtcagactcagccaccctgccccacgcagacttctgggcctttctcagctagagttgaacagggacatttgccatgactgcagctctgccctgaaccctcacacccagccctagacaagggtgtgttgcaccccttgtaagtggcttgataccacgtcaggtccaacgttgtggtgatcctgtgcgagtggagagtgagttcctccccttttgcagtccccaaaggaccttgttgatggctcgattattttttttatgcctcaatttttgaactgattctaagtccctttggggatccaagcagaaagacaaccttaagtaggaaaacagccaaattattctgaaagaatatgttttgctataactgtaaaattaagataaagaaaggatgtcagttgaaggctacttccagagaggatgtcctgaaaaacacagatggtactattttattagctaatagtgtcactctggggcacaaaaaaatgatttccaattactagagctgaaacgtatcaaagactgaagtaactctttgcatcctattcttcaaaaaaaaaaaagtgtgtgtgtacatgtatgtatctaaatatattaagaaaagcattatctttattccacgtactttttttgtttttgtttgttttgtttttgagacagtgtcttgctctgtcacccaggctggagtgcagttgcacaatctcagctcactgcaacctctacctctggattaaagcgatactcaagcctcagcctcctgaaagctggaactacaggcttgcacgaccatgcccggctcatttttgtatttttagtagagatggattttcgccatgttacccaggctggtctcaaactcctgacctcaagtaatctgcctgcctcagcctcccaaaatactaggattataggcatgagctgctgtgctcggccccacctacttttcttatattatgcctctctcctgggcacaaacactgttaattaattttatagttgaatgtgaagattgttttttagctcagtttaaactggggaattgaaaacattatgccagaatcttcagaattaggtacagcctataaagttttctgaggaacctgaattttctttaaacacgtctgtctccttgtagctccttttaggtcttttttaaacatatgagttgtatatccccccacctcttatccttcccccgttttctaagtaaaacagctgactttgttaaatgcaagttcagtgttttatttgctgcctttgtctatatttgacaaagctgtggcaacttaagaaaaaattattattaaaatgtctcacctgcactctaaaatcttgcttttttttttgtgacttagtctcactctgtggcccacccaggctggagtgcagtggtgccatctcagttcactgcaaccttcgcctcctgggttcaagtgattttcccaacccagcctcccaagtagctggagctacaggcacacgccaccactcctggctcatgttgtatttttagtagagtttttcaccatgttggccaggctggtctcgaactcctgacctcaggtatctgcccatcttggcctcccaaagtgttgggattacaggtgtgagccaccctstctggccccagatctccctcttatttacttgcctcctacctcagtgaagccagctgttcttgtctgtttaatgtggctacaacagaatacctggggctcggtcatttgtaaagaaaaaaggttctgcaagctgggaaggagagaagcatggcactgccttctggtgagggccatgtgctaagtcaaaggggaagtggacacgagcagtgagagaggaccaaacagaaggagaattgcttttttcattttttttaagagacactctgttgcccaggctggagtgtagtggtgtaatcatagcttactacagccttgacctcctcagctcaagaaatcatcccactcagcctcctgagtagctgggactacaggcacgcaccaccaagcccagctaactttttwaattttttgtagagacagagtctcactatgttgctgaggctcgtcttgaactcctggactcaagtgatcctcccacctcagccccacaaagtgctggagctacaggcatgaaccacctcctggaattgctctgtaacaacctgctcttgtggtaactaagccagttttgccagagcatgactcactcattagcatgaggatggcaccaacccattcatgagggatctactcccctgatccaaacacctcccactaggccccatctcccaacactgccacaccagggaccagatttcaacatgagttttgatggggacaggcaacccatattcaaaccatagcaccagcatatcctacaaaaagcactcccagaaagccacctgctctctgcagagatcgcagttctgactccctcccttcagatgcccttccatgggaaaggccttgaactggggaggacagcccctggaattttgagaccagcccagcagcagggygcgggaggaaggcgccccgggcatctgggctcccccttgttgggagttggttggcagagggagaattgcacacacttctagacgacttttcagaatggtgcacagcagccccttcgctggcttttgcacaaagaagcaggggcaggtggaatcaaaggcgctttgtgttactcagctgacagaacattgcctgtgcacagctggttcatagattctgtgtgcagtccagagggagaggcgccccttccctcacctccagcccacacacttttcagatgtgcttttcagttcctgcttcatatttcgagggaccagctgagtcaatcaattggcacaatcagtgcaggttgttttctgtcccataggatacaaaacaaacaaaacaaaacmaaaccattgaaggctaaggatggggagctgggggtggggaggcactggcaggcactgtaaatgcattaagaatcacacggctgtgtctccaatggctgaagcagccaagtgatttttgacgctcttttttcctttaattattatggtgctggtgagccaggtccataagaaaatgataaacacttctagaactctgaaattttgagatggcttcaagctatttgggcaagtaaggtgtatgtgtttatgggtactttcttagtgggtgaaagtttctgcgtatttttaaataatgcaatagagagttggttttgacatgaatatttggtttatttttttttctgaagtaccagtagaaaagtgtgttttatgtgttgcctgcttcactcagtccgcctgctttcggggcctctttcacatcagctaattttttatacagttttcgtttgcccttgcctctgatgacatcatatacaagctcagacttcagaaaattagattaaaaattgttatttcctacaactctccatgctcccgctgatgataattcatggcagttgatgttttcctatttgtgtgaagcacttctaggcaactgtctggtttccattttgaagctggttattagaattttctgtatctaacctgaaagaagttaagcaattttcccacttgttaacatgcttttagtgtcagatgccattagccacaagtgccttcttggaggacctggcccagaaaggatagtgaacgtgcccgtgtgccagcatctgcggaccttatgtgtgtctggtactggtcctcctgcttttgattagtttgatgctgtcaccgcccactaacatggtcaaactagatatttcacggttgccattgcccctgccgctccctcatttccacaccagcaggctcaagtcccaactgctctctctcctccccattttcagtggctgccctctctcccctcccctagggcctgccctgatcacttgtctgtgccatcggaagagtcccctgacttgtcttcctacctagtctttccccttcaaatctgttccagactctgcaaccagttttctttgtaagacatggatgttatcatgtttgactgatgctgaaaactatgccacggattctttccaaaaataagaacctcagcatagcacattcagccctctgtgtcaagacctcactctgtgtttcagactttcgttgtaatgcaggtgcttcccaccgtscaggctgtgctctgcttctgctcatgtactcgccaccctgccatcctccaggcctccagggctcatgctgcaggttgtggcctctgcctggccgtgacttcagctcctccttcacttgccaaatccctttggacacagctcagatgtgactgccccccaagctgtccctgatcccaaccagaaacaaccattccccctacagtctcacagctctgtgtttgaataatatagtaggcaatatattaactgataatacagtaggcagtatattaactgataatatagtaggcaatatattaattgatttattcagtacgtatttgacaaacaatactgaatatgtgctgaattgatttctatgtagttacaccttgtaattcatatttgatgaattgatttctgcatatttaaacacatacacctgttcctggggaaatgatagagatggatatagaactattaaaaaatacaagctcagaatgttacaaatcatcatataggatcgggtgggctaggggtatccagtcagaaaaactgtatggaccaacttgaacctgatcaatactgatcacctaaaaatggaaagcatagatatgttccatttggtcattttacttattgaaagccaacctgtttaaaaatttgaggatagacttttttttttcaaggtggagtctcactctgctgcccaggctggaatgcagtggtacagtctgggttcactgcaacctccatctgccgggttcaagagattctcccacctcagcctcccgagtagctgggactacaggcaagcaccaccacacccggctaatttttgtatttttagtagagacagggtttcaccatgttggccaggctggtctcgaactcctgacctcaagtgatcyacctgcctagggctcccaaagtgctaggataacaggtgtgagccaccactcccagctgaggatgaacatttttaatacatgtttgctttacatttcttatttaaccttgtggcaggaatgaaatatatttggtctttgtgcctggttcctgacactgagctcttaaaacccttgggattttatgagtgataagagcatcttttactaaaatctaacttgatgctaatgttgacttagagtggagcccttagctagcctcaggatggggtgggtctccagaaaaacctaatgattagagagttggaactttttcagccccacacaccaacctccagcgaagaggggtagaggcagctagagatcacactctctaaaaactcgaacaagctgtgatgagcttctgggctgctgaatatatacatggaggtgctgggtggtggcacatccacagagggcatggaagcttggcgtcctggccccatacccagtcctacgcacctgttcgtgtggttgcttgcctgtatcctttataataaaccagtaaatgtgtgttccctgagttctgtgagctgctctagtgaataaattaaacctaaggaggatgtcataggaaccttgattgatagtatagatgacagcctactactggggactggcatctgaagcggggggttgccatcttgtgggactgaggcctcagcctatgggatctgactccaggtagaaagtgtcagagtggaagcgaatgagaggaaacagagttgatgtccactggagagttgtttggtgtggaaaaatcctgcacgtctgatgacagcagtgttctgtgctgggctgaatgtgtgagaggagaaaaagcactttggcttttcctatctcttaccaaccgctaatagaagcaatgtagaattatttacatgagactgtagtgcatttcataacatgactattccaacaaagaaactctatatcatcatagacagtttcacagctcataaaggcatttcagaggcaagtgaggctttgaggggtggactttccataagtcttgcttggctgctagaactttcatgatgttgagggtacctgcccttgtactaacacctactatatcggcactgtacaaagaacacaccaggccgggcgtggtggctcactcctgtaatcccagcactttgggaggccgaggcgggcagatcatgaggtcaggagatcgagaccatcctggccaacacagcgaaacgctgtctctactaaaatacaaaaaattagctgggcgtggtggtgcgcacctgtagtcccagctactcgggaggctgaggcaggggaatcacttgaacccagcaggtggaggttgcagtgagcagagatccgagattgcaccactgcactcctgcgtggtgacagagcaagactccatctcaaaaaaaaaaaaaaaaaaagagtacacacctacacacacagcacacacagagatgtttatttctaaccacaatgctattacattactatcaaacccattttccagatgagaaaatgagtcagaatttaagtaactcgccccaggctgtcctgtctagagttgcaggcaggctggagcaacacaaagcctgtgttctttctactgaagcacatgacttctgtatgaaactccatgaagacacagacctatggaaataaccttgtgttttattgatgtgacttgtgatttcaaggcaggaatgttagttttcctctctgctgttgtgtttgctttgaacagcgatttgttctttggcagaggacccatccagcctggggccccgttgacagcgccaattctgctgtgtttcagcagctcagcagcagcagatgctgtccattaatctcactcagggtctcagctctgtgacatgaggtccctgcaacattgctcctccctgctctagtttctcattgtctgaggaatgcaggaaaatcattctgaagatatccgccatcctggctcatctgacatgaccagttctaggctaaaaccaagctacagctcttgagagccgtagattccatgtgctgctctcctgggttattgcgtggctgccaaccaaccttgcagcaggaagaagggagaagagaagaagaagacaagtttgtaagcctgagttgggcatgaaagcccaaggttttctaaaaaatcttctctggaagttgatgaatcttttttcaatggaatgatacaaaataactgacaatcttattaacctcatggcagagccaagaaaacaccttatgctttgattaaatgatacaaaaaataaccagttgaaaagtcaattttttttcaaataacagtgctgtgttatagaaaggacagtggattaggaatcagaaggcaaatgtgggtcatggttcctctctgcgaactctctaacactggaacattgaggaaatcacggaacttccatgaaggaacttccatcagttgtgacagcaactactcacaaaatgtctctgatattagcagtagtacggtctccttagagatgctggatttccagtttcatgggcgtattctcatggatggaatgtttttcagtgggcgacactaactggctgttggagatctgtgtggggacatggccatcacgtatgatccacaggcacttctctggttctctgtggctggttctgattttattccaagtttctgaatgaggtggtttctatcccgatgtgcccttcctatcttttcttcctcttgtctcccctcatttcagcctcttccgaatctcacttctaacccacaccccatctccaaaacactgggaagtctgcattgagatgataaggttatagtattagcacacttttgtatcaagttctcacagtgtctgaaatgtggttatgattccatgatgtctctaatccctactcacccagttcttaagaatcatgggcaaccccgcttgggtccccttccacgctgtggaagctttgttctttygctcttcactrtaaaccttgctaccactcaaaaaaaaaaaaaaaaagaatcgtgaatgataaggaaataatgtggactaaatgttttgaattacttaatgtttgacattttacagtgtataaattcgtattattgtcacatgtatcattcagaacacagtaatattgaattagagcccatgtttttgaccagtcatgtcacggaaaagaaagggaatatgctgacttttccaatttctattgtctcttctgaaataaagtacttttatgtccatgattgaaatataatcaaattggctggatgccacggctcatgcctataatctcagcactttgggaggctgaggtgggcagatcacaaggtgaggagtttgagaccagcctggccaatatggtgaaaccccacctctactaaaaatagcaaaataagccaggtgtggtggcaggtacctgtagtcccagctacttgggaggctgaggcaggagaattgcttgaacccaggaggcggaggttgcagtgagccgagatcataccactgcactccagcctgggcaacagagtgaaactctgtctcaaaaacaaaaaaaaaagaattcacccatattattcattatgctatagattttaaaaacttcttcactccctttatcttctattatcgccctttagggagacatggaaaaccttttatctgtttacttcagggaaactatatgagatactgaataattgtaatgtattcagtgttaattataaatacgcagcgtatgtttttatatgtattgtatttatgtgctttaggtaattatgcatgtgagttccttgccaattttatggccaaaatattttacttggctgattactaagtatattttaagcttacttcttgaaacatgaagagaatatactataaatccaattaacataatttatctgcctaaagagaatggttgcttttattttttttctccattttaatgatgaaaaatagttgtaagagtatggagtatttaatttgtttttaaagctttccaggcccaattttgttgttttcttttaagagaaaaatataattttaaaaagaaatttggaaattttaaagaaagcattaaaaaaatcacctataactcactatcaattttcaataattttctgcctaatattttaaggcattacaatcttaacacaaagagtttcatatcttatttttacacttaatattatatcccaaatgtttcctttatcttttctatgaacactgctataaataactcttaagatttacctccattcctttctaaagatgtatttcaagagatgaaattactagttcgaagtatataaaatgcttaagattcattacatactcctgttttgacaacctgttttcatgaaggttgcataagctcacattcgcatcagcactctgtaagaatggttacttcagttcctcactaaaatggctattaaacttttaaaagatctttgccaatttgatgagtgaaaaaagattatttccttattgttccatttgaagctatacatgtcttcatatgtttactgaccaggtgaaaattttcttttgtgaattgttcgtatcctttgcatctttacccactagagtattattatttgtctcctactaatgtgtctaagctcttttattgcctacctttcctttcttctgtagaaacatgttgttaattctcagtatttgtgtttccatnnnnnnnnnnnnnnnnnnnntgcatgggatgcatttataaatcttgggagaattgtcttcttggcagtattggctgttcctatccattaatatggtttatgcctccatttgtttggatcttctttaatgtttttcaataaagcttcaaaatcttctttataaatcctatacatcttttggtttgataagattaaagtctgccaactaattggataacctagaagaactgggtaaattcctagaaacgtacaacttattcatgaagaaatagaaaattcaaatatagcaatagcaaggagattcaatcactaatcaaaaatctcccacaaagaaaagttcatgtccagatggctttactggtgaattctaccaaacatttaaagaagaattaaggctagtatttctcagatgcttccaaaaaagttgaagatgagaaaacagttccaaactcattttacaaggccgatattaccctgatccaaagccagataaggaccctatgagaaaaaggattaaccaatatccccagtgaatgtagatccaaaaattacccacaaaacactagcaagccaaattcaacagcacattaaaaggatcatacaccataatcaaatgggatttatccctggggtgcaaggatggttcaacatatgcaaatcaataaatatgataccccacattaagagaatgaagcatataaattatatgatcacctcaatatatgtagaaaaggcatttctcaaaattcaaagtcctttcatgataaaaactctcaacaaattgtgtatagaaggaatatacctcagcatatatgaaaggccgtatataaagtttccagctaacatactcaacaaagaaaagctgaaagcttttcttctaacaagacaaaggtgcccactctcaccagttctgttcaacatagtactagaaatccaagccagagcaattaggcaagaacaagacattaaaggcatccaaattggaaaggaagaagcaaaattgtctctgtttatatgtaacatgatcttatatatagaaatacctcagagactccaccagaaactgttataactaataaattaatcagtaaaacaaaataaacatacaaaaatcagttttacttctatacacaaactatttgaaaatgaagaggaaaaatcatatttataatagcatcaaaaagaataaaaatacttagaataaatttaaccatggatgtgaaagatctatacactggaaactagaaaacatttataaaagaaattgaagatacaaataagtggaaagaaatacccatgttcatggattggaaggcttaatattgttaaaatgcccatattacccaaactgaccaataaattcagtgcaatctccattgaaattccaatggcattttttaacaaataggaaaaaaaattctaaaatttgtatggaactacaaaggaccccaaatagccaaagcaatcttaagaaagaataaaactataggcattagactccctgatttcaaactttattgcaagctacagtaatcaaattagtatgatcctagcataaaaacagacacagagaccaatggaacagaattaggagcccagaaataaactcatgcatatatgatcaactaatattttacaagagtgccaagaatacacgatggggaaaggataatctcttcaataaatggtgttggggaaactagatatgcacatgcaaaagaatgaaattgggttgctctcttatactcacaaaacttaacttgaaattcttcaaagacttaaacatgagacccgagacagtaaaactcttagaagaaaacctagggaaataccccctgacattggtcttggcaatgtttttttctttgtttgtttgttttcttaggacccactacaaagcagtcaatgacattttcgatatgaaacaaagacataagcaacaaaaccaaaagtagcaagtaggtttatatcaaagtacaaaacttctgtacagcaaaggaaacaatcaacaaagagaaaaagcaacctacagaatgagagcatatatttgaagaccgtatatctgataagagggttaatattcaagatatataagaaattcatacaactcaatagcaaaaaaaaaaaaatccttaagaatgagcaaataacctgatacatttttccaaggaagatatacaaatggtcaataggtataataaaaggtgattaacatcactaatcatcaaggaaatgcaaatcaaaaccacaatgagatatcacctcacacctttcagaatgacaaatcaacctaagtgttggcaaggatgtggaggaaaaggaactcttctgcattgttggtgagaatgtaattttttaccaccattatggaaaacagtgtggagattccacaaaaggttaaaaatagaagcatcttaaagagacatctggactccaatgctcattacagcattattcacaataaccaagacatggaaacaacctaaatgtttatcaatagatgaatggatgaagaaattatggtgcatatatgcaatggaatattattcagccacaaaaaaagaagtctaccctgccatttgcagcaacatgaatgaaccttgaggacgttatgcaaaatgaaatacgtcagagaaagataaacactgtatggttttacttacatgtggaatctaaaaaagtcatagaaacagagtagaacgatgattgccaggggatgggggttagargaaatggagatgttggtcaaaaggtacaaactttagttattagatgaagaagttccgggaaactaatgtacagcatggtacagcatggtgactgtagttaattatacttattacatacttgaaatttgctgagacttaagtagatcttaaatgttctcaccacacacacaaaagtaactaaattaggttataagatgtgttaactaacttgactgtggtaatcatttcacaatatatatgttacatgaaatattttaaaaacataggttgacaagtacccttaatagmttgtcagttatgattaggttaaggaaattccctttaatccctggtttatttatattatttaccatggatagatactggatttgataggatcctttttagcattttttgagatacaaaataattatttgatttctcttctttggtatgttaacatagaaagttaatataacatatatgtgatttatataattaatattattattatataccaaaaagccaacccttcatccttgggataaacctaacttggtcatgatatatattaaacattgctgagwgctgttaactgatcatttttcattcatgttcataggcgagtctaatctgttagttatccttattatattttcatattgtgattttagaattaaaataatatctgctttttaaaatgagtggaatcacattctgtatttttttattctcttaaaattatttttcccttaagtgtttaaaagtcacctgtaaaactggctagatctggcaatttccccatgctaaaattttagattactaatttttttcagtagttaataggtctgttacagatttctcatttttcttgagttaattttgatagttaatattttcatatgaatttctacattttatcttttttatttagaggcatacatttcttaatatattcttatctttttaatttgtttctactcatgtttctttatccctttttcataattatatagtttatttatgccttcttttttcctttagcattcctgccagacgtttgtcagttttattaatcttttcaaagaaataacttttgttggctgagcgcagtggctcacgcctgtaatcccagcactctgggaggccgaggcaggcggatcacctgaggtcaggagattgagaccatcctggttaacatggtgaaaccccatctctactaaaaatacaaaaaattagctgggcgtggtggtgggcgcctgtaatcccagctactcgggagaggagaatcgcttgaacctgggaggtggaggttgcagtgagccaagattgtgccactgcactccaagcctgggtgacagagcaagactctgcctcaataaaaaaaaaaaaaaagaaagaaagaaagaaaaaagaaaaagaaatagcttttgtgtttgttgatctttaatattacattttttaaaaatttcttttaatactgttctttattaatttccttctactttctttgagtttattcttttcttatttttaaatgaggtgctaaacacattaacttgccctctttttttcaaatataaacattgatttgagagtattgatttttcctctaagtattgattttcctctaagtaacacttgccctgcatccagtaagtttgacagtatttctattatcattgactattaaatatttttagtttttaatatgaattatttgacccatgaattatttagaagcatgtgagtttatgagtgtatattttagttctcagtgcatggaagatttttatctttttattaatgatttccaagttgattgcattatatacaatcagaacattcattgcaatttgtgaacattagttagagccttatacataatgttttcttaaatattttatgtattcttaaaaacaatgttgagcacagtgttttatatattttttagatcaagcttttgttcacattttctgtatacttaatttttgtctatttaatctatcagttactgaaagaagtgtgttgaaagaggtaatatattttggagctaagttataaggaaaatacaagtttagaattgctatcttttaaagtgaatttaacattttatcattaagcactgatagaattatctttagtaatgtttttctttacagtttattttgtctaatttcaatataactttgccagtttccttctaattagtattttttctagaatatattttcaacccctctattttagtggtgtctcataaataacatatagctagattttagtatttcaatcaagtctcacagcttttacctttaaattctaccatgttaccacttagtacatttttagtttattgtggttcatgatagatttgaatgcatttctatcaccttattttgtaagagatgtttcttccatttgttcttaggcttctcccccaccctaccttttcttccctatataggaagttcatgtaaaatggagtgaatatctgtaatttactttgattctatagatctctctagtcttgatctttatgtgagcccctgactgctggctcattttccctctatgaattgcagtggttctgaaagatgggattatatgttccataccctctgctcagttacctctcctttgctactgccctgggctcatcattcatcttctcttttgtcactgacccaaagcctagacttcagccaggtccatgcatcttcctccacagctcctgttccttcttgttttcattgcattgctgaaccttcagagctttgtctaaaagctctaatttttaaacaagatcctcccagtaaaaacatattctcaggcatcagaggttgtggggattcagcagtatggtaggaatcattggtatatatgggtcttttataagttacatttgcaattcaagactgacagtatttagaaacaatacgacttgtcctgtaagtctgatgagcagaaaggaggagaaaatggagctcgccaaacaattcagaactgatggaaaagcagyttgctcaaaagccccatatggtttgcccattttcctctgccctttggaaattcctctaaacattagttctgactgtcagcatgcagtccagtaacatttttttttcaatcccccagctcctctgcaatggggaggcaactgacctactccagtgtgcttgaaaccattgtcactgtactcaagagcaccaggtagcactagtacttctcccaatagatggagcattaagctcaccagtgttgctcactgtcatgctgtttcgtgctttgttggtggggactaaatcttgtatagagttttcagcggtttatgctttgtttagggtcttgatatccaatttccatgttggacttcttgtttatagtttggcacagagctcattaatgttgaccccttarccattttaaagaacctcagatackctgcagaacgtggaatttgatctatttttcactaaataaaatttttaaatttatgtgtttgagtactagctatgactactgcattggtcagataattttaatgcttttttaaaaatctgccaatatttgacatcagtgttcccataaaataaataaatgattcttcataattgcttttccaatgcttttcccatgtgactcttttcaatagttttcactccaaaattgtgtgagtagtggctgtcatgattcttctgaactggcaattatgtcagaaccatttaatcagtgcctgagctgtgctggcattgctcttggaaggccatttttcagaatgacatccacctaagcatttgttaaattattagacctataaacccttcccatgagaactctcagaaatactgttagatatgcagagccttagggacacagccctttgcaccaccgtaagtaccagaactctgttaagcaaagttcaaaactttgagccagagtggataagagtcacagctctctgtcctcaggaaacatccctccaatgtccttgtcaagagcttgcatgcatagttaatcaaggaagaactcactgggattttgagtgacatcagacaccattccagcattgcatgttgaaggattactagcagggtttccccttaatttacgagacatatatgattatccttcagcctgcagtcactgtaggaaacatgtttcttctgcaacctgcaactggtagatgccgtaagaaaatgcataaaaaattagtgctagattttgaaatcgttattaaaaggatcataaaaatcaaagcatccctgtctcagttctgtccatttgatttataaggaggctaaaaatggaaatgtaggtttcaacgggaccaggtgtggtagctcatacctgtaatcttagcactttgggaggccaaggccggggaatcacttgggcccaagagtttgaggctaacctgggcaacatagtgagaccccgtctccaaaaaaaagaaaaattaaaaaattagctggccatggtagtgtgcacctgtggttccagctactcggaggctgaggtgggaggatcactggagcccagtaggttgaggcttcagtaagctatgattgcaccactaccctccagcctgggcaatagagtaagattctgtaaaaaaagaaaagaaaagacttcaatggttccaggaaactctgttgcgtttagagctttataggtaggtaaagagatttttctgctgtttgaggcatgaatgcggtcagaaagtcttaaaatctcaagccttttcctggcaattttcttgtgctgcctgacatagggggggattatagacgtaaactgcggggcatgcaattaatnnnnnnnnnnnnnnnnnnnnnnnnnnnnnnnnnnnnnnnnnnnnnnnnnnnnnnnnnnnnnnnnnnnnnnnnnnnnnnnnnnnnnnnnnnnnnnnnnnnnnnnnnnnnnnnnnnnnnnnnnnnnnnnnnnnnnnnnnnnnnnnnnnnnnnnnnnnnnnnnnnnnnnnnnnnnnnntgtgctgccctgacatagggcacacgctgctataggaaactgcggtttgcttttcccttctgctgaacctctcaaaacctctaactcctcgagaaaagggattcgtgtctatttcataggactgttgtgagaatgacattttgtgtatgcgtcaagatatcaatagatattttcactgtgttctagaactgggtcccttcattcttggatcactgccagtgtctctgatcgattcagtcattataccaccagactttgctttcctgagtcatgttgaaacattattcacttccctgtgcttagaaactcacagtacttaaagccctgagtgtttatgacccctcattagtgagctccatcctacctctcttgtatctccttgttctgtggtaaagacctctcgcttgggtcatgtccacattttccctcaattccacgccactgtctttgttgcgggcatcacttgcctctgcttggagcccatttctgttctctacctttycaagtcctttaggttggttccactaggaccagctcaactcctgcctcctccttgaagtcttcccacccaacccatccatccctcactgttttctcctttctctaaactttcacagcatgttggagtccctgcagtttaatttagactctatttactacctctctatcctgtttactgcctatttcatgagtgttacaactggactgcatcttctctaagtaggaggccttcagttctttgatgtggtctccacactgcccattttggacaagctgctctttacaggattgtcatatgataggtcaacgcagaccagtaatgcttaagtttaacaactgatcataatttcttggttttgaaaatgtttagtaccaggtagtggacttcctcgtggtggtgggaagagaaatcaatatttttatcctaacagcagttgnnnnnnnnnnnnnnnnnnnnaatatttttatcctaacagcagttgatgttattgaccatcaactgtgggctgggcactgagctaaccatttccatgtgtgatctcatttaagcatcagcacagccctcctcccagcagacatgaggaaactaattcttagagagctccatctcatatctgtgtcaccacgctcatgagaggtactgcaatctgaaccacaggacagctgactctggggctcatgccgttctacaacaaaaaaatacaatctccatcctcatcttccctatgctttgggtctgtgagacctgtgagactttgggtctgtgagacctgaagtgttggaggacaggttggagcaggtcttctatgtacatcagataccagaatgcaacctgacaactttctcctaattgtgaatgacagaaaaaaaggatgatttgtagagatttgccaaaactgtaattttttttttttttgagacagtctcactctgttgcccaggctggagttcagtgacgcagagtttcactgcaacctcccctgcctgggttcaattgattctcctgcctcagccccctgagtagctgggactacgggcacctaccaccatgcctggctaatttttctatttttagtagagatggggttttaccatgttggcaaggctggtctcgaactcctggcctcaagtgagccacccatcttggcctcccaaagtgctcctaaactgtaatcttttttatttttattttttcccaatatagaaacagtagaaatgttggaaattgaggttattgatggtgcaactatatgatgttgatgttaggattttcatcatgtaaagtggcttagttttatttgtgttgtttgtataactttgactagttgaagtcagacttacctagtgttgaaagtgagacttgagcacaaatttgcttgagttagcactggagaggcactgcaggaggcagccaaaggacagcaaagtgtatttttcttttgcgtgtaaatgttgtaatactgttttgcaataagtgaaatatgtgtgatcacataaaggagcagtggagaagagatactgaaattctttgtcaatggttgatatatagaaatagacatacttccaaaagttaatattacagttatataaacttctataatctaactgattagaaatcttacagagtagaaatgaagcttgaaaatgagcaagatttttctaaagtttgttttctgtgcctgtgtgtttccgtgtgtttcacattctcatggcatggtcaactggaaggtattccattggttatcatagctatgctactaggagagctatactttaaaaatattttctgttaactaacgcagtgaggtgcctttgaagacttgagatagccatgatttaaatggaaaagccaatatgttgtgcgtatctgtaagtacacatgagtagggagagaagtgggctagaagaaaaaaattaactatggaaaaacataagcatatccacaaagtaggattttggtttctcaatctataatattatttcatttccagattgtgaacaggtggcacacactgtttctttagctcttttgtggccaaccacacatagctatttctccatacctactcatatgtcacctaagaaactacctaaattgatctcaaatggatctaatgagaaagacatgcctggcatctttgtaaaaataatatctatacagcaggcaaagttgctttaaagtgtttatttggggagcaatgcaaagtattaaagcatctgttgtctctgcagctgaacttttctaatatttttacaacagctaatttaacctgagtgcacaattccaaagaaggaagttgtaggataaaaaggtagagctgaaatgtacataaatctttagtgtccttgtagatctgatacactgccgtactttcctaagcttatgcaaaacagaaagtgaagaggcattttgcagaaaactaaattatacatgaagtcattaaacctcacccttcacttctgattgagggattgctgcagtcgtcagtgaaagcagaggcaaaatgaaaaaataaataaatgaaagacctgatcacattatacatttcagtggaaatgtaattgcttagaagttcgtttgaagttattgggtatgtgcaaaattgcatgtagctgctgaaaataagaaacgggtcatggcacagagcatccttgtgaacccagaatctatctctcacatgtgtggggtacagagggcaagagggagggtcgccttggatgctctgctacaagtctgcgtatcccaatcagccccaaactctcctgttcattgaaatgtttacttgttgtcttgacttgtttttccacccagagatgtatttatgcacataacacacactgtttacttctttttccaaaggagttttgtaactgcctctttgaaagcatgtctcaagagggggagggatagcattaggagaaatacctaatgtaaatgacgggttaatgggtgcagcacaccaacatggcacatgtatacatatgtaacaaagctgcacgttgcgcacatgtaccctagaacttaaagtataatacaaatatatatatatataaacaaaacaaaaaaaaactctttaggaaggttgtgagatccccttttttgaagatcatatatcctcaaaaatgttctcatccatcaaggatggtctaaatatgagcattgtgaaagaataatgatgtaataatgacctctatcaaggtcatcttccatggtgaggaacgtgaaatggaaaaggcatgaaacggcatctgtgcaagacttcatagctctcaagcctgatgtagcagggctggagaaagaaggaaaggccttttccgacccttaattaaagggacttttgctggctctttgcagattgctgctggcgccccatatagttcttaattaattccgcctgtgtcattacaaagtaagccctactgaagagtgggttaacagccggagtaagctccctggactgcattttctttcacttgacgctgtgtcttgaaggctccagcagtggggtggagctgcctctaggagcaggcctgttttaatcagcatatcacaggtccgtagtcgtgagacagaacgtctccctgctcacatgaaacgtggcttgactaagaactcagtgataacaacacctctaaaaagaaataaaacattgaatgttcactatggagaggatgctcagagaagcagagattgtctgtgtgtatccagcactgactctcagcctgccgagggagagccatgcctgcagagtttgcagtctcctggccctaagatgacatccccagaaagctttctgcttcgtttactccaacccagtgctcaccacacagcctcagctcaggggtctggctttctagatagtgccactggctagggcacagcaggcacaacagacacttggaaagaaaatctccccattttaaattcatatgttggcattcagggttacacatcagagtcgcttccatttaatgtgtgtgcagccgtgactggaaatgatgcatctctaagagtgggaagtgtacgcatctgctagggctgctagactgggtggctcacacaacagaaggttactttctcacagtctggaggctggaaatgcaagatcaaggtgccggcatggttggcgtcctctcctcacatgttggcttgcaggtggtcagttctgcacgcatgccccagggtctctgtgtgccctactcaccttttctaaaaaggacaccagtcatattggattaggatccacccatatgaccttagtttaacttaagtacttctttgaaggccccatctccaaatacagtcacattctgaggtacgggagcttaggacttcaacatattgatatgaatttgtggtcgggggtggggggggggtcacaattcagcctgtgacactgagaaatcatattctttgttcaggaatgctgagaggtctcgcaatttgagacccgaccaaggttgggctgggcaaggcatcagcctcattggtgggtcccctgtgaatcaccacctgagctgcccaaaatggttgctccaaggcacatgtggctatttaaatgtaaataatttacattaaatgttaaaattcagttccttggtcatcccagcctcgttgcaagtgctcaatagccacaggtagccctaacagccatcatatcaggcagtgcagactagaatgtttctgccaacgtagaactgcccttacgttcttgttctggagggaccacgcacaatggctgtgcagtgattaaaagaatcccgcaaccagcaccctgcacctgcctgctttgtgcccagctctgtgcctgtggaagttaaaaatggggatgcaggccccctcttcaggcaacacggtctaattgtgccagtaaaaataacattaaatctcacatattagagatgtgaagaaaacttaaatggcacatattaatacccatgatagacttttgaaggataaaagaccaatcaaaactaaagtagaaaatacatggaaaagatagatttgagctgagttataatggttacaccagctttgcaaaggaagtgaaggaagggccccctgctcaatgaacatcatatcccacagcaactggaacgcagcgggcgtagaagccagatgtcgtcatgctctttatctgagacacacaatgacaccatgctgcattctctccctttcatgttttagtgtctcttgctccttctcagcctttcctgtgcatttatcgctacatccttgggttcttggacatcctggcagatccactgggatctccttcactgtactctcttcctctagaagtgttttgttcctggtctctcctcctccacctacagcaggatgcttgttgcggggattatcttagggactccaaaatcacttaagcatggcccttctacagcaacaaaaatctgtgccgtgcagtaggatggccactgctgcttgtggttctgagctctctctaagtggctgtgatgacggaggaatagggcaggagtgcttgactgcaccataaactaagaacccacagcttcttttgcctcaactctttcmgcaaccctgacctttctctagtggatgcaggaaagtttcaataaccctaagaaatgagtgccacctccctgttcactcatttagaggtagaagtggattgaggtccacagacgcatttgaagaaggcgtctcctaacatatccagtattgataacaactctgagatcacagattcaatgttgattattcaatattagctattatttagtttagtaatttaattatcagacattacaggtatttgcaatatttcatatcaagtttaagttattttttcaggacccaaggcttggtggagaattcttagccattacaccaaaagcattctccattaaagaagaaaatcaagaaattagacttcattaaaatttaaaactcttgctgtgtaagaggatgaaaagacaagctgaagactgggggaaaatatttacaaactacatatcaaaggattcatatctaaaaaatataaagaattctaaaaatttagtttaaaaaatccaattagaaaatgggcaaagacatgaaagacacttcaccaaagagaatgtacagatgacaaataaacacatgaaaagaagtcaacacgaccagatgataggaacatgaaaattatgaccatgatgaggtacatcatattagagcagccaaaataaaaagcagagacaataccaaatgttggtgagaatggagagaaactgtatttcttgtaaactgctgctggagtgtgaactggtacagccactctggaaaatctttaagcagttcttaaaaaactaaaacagatgccaggcgtagtggcttacacctgtaattccagcactttggaaggctgaggtgggtggatcacctgaggccaggagttcgagaccagcctggccaacatggtgaaaccctgtctctactaaaatacaaaaattagctgggtgtggtggtggccgcctgtaatcccagttactagggaggctgaggcgggagaaacgcttgaaccctagaggtggaggttgcagtgagccaagatcgcaccattgcactccagcctgggcgacaagagctaaaccctgtcgcaaaaaacaacagcaacaataacaacaacaacagatttactacatgacccagcaatagcactgctgggcatttatcacagagaagcaaaaatttatatccccacaaaactctgtaaataaatatccataacagctttatttgtgatcaccaaaaactggaaacagtcaaattgctcttccctaagggaatgactagacaaactctagtacatccatataccatggaatattactgagctgcaaaaaggaatgaactaatgatatagacaacaacttggatggatctcaagggcattgtgctcaggaaaaagaagccagtacttgatgattccatttgtagaatcttcttgaaatgttaccgaaattagagagatgaacagtagactagtggattccaggaattaggggatattcagtgcctattcagagattccacaaggaagtttttttgtggtgacaggatatttctttatttgattggagatctacacttaagacgaaatggcatggaactatacacacacactgtaccagcttcagtttcctgaggtacagttatgtgaggtgtaatcattggggaaaaccgaggaataaatggaagctctccataccatccttgcaacttcctgtgaatctagaattatttcaaaataaaaagctttttaaaatctatttattagtataatttaaaatttatgtcaaatttattggttaccaacataatgattctttaattaactcactggtgattatcctgataataaggttaaccttcagtttgaaagatgctggggtctcttttcatgagcataatttacaactgtaatgacaaaatgaggcaaggatttatgtcaattaacaggcttacatctatgagacattttgggtaaaaattttagcatggtacttggaacacagagagctgcatttgttatcttgtgttattgttagtattatgttatttatttatgttttttgagacagagtcttgctctgttgcccaggctggagggcagtggtgcaatcgtaactcactgtagcctcaacctgaagagatcctcttgcctcagcctcctgagcctgagtagctgggactatgggcatgtgccactatacctagctaatttttttttttatttttagtcgaggtggggtctcgctatgttgcccaggctgttctttctcctggcctcaagcaaggcttctgccttgtcttcccaaagtgctgggattacaggtgtgagctaccacacctggccaccattgttcttattaatactactgaattggttatttattgtgattttactaaaagaatttttttgtcatcaaaatcgtttgagcctgcatttttttcttatgacatttcttggcaaaaactcagattccctttcaggaattttctttgctgaaacaacagtctagctattgtgtgaaagtccattctggtaatgtgggtcctccaagggcattagctctcggctgtttgcatttcaaaattgaccctcaagtttactttcatttactttcaactctgttgccttcttgaaaatgttttaaggcagtacatctaataagcatgaagcatcttacttttagtttaatcccaaaccttgtagttctaaataaaaaaattgaaccacgtgcccctaaggttttaatctaatatctggtttcttgaactggggccagctcttcatttttcaaagcatcaacagattctaaatacaacttctggcaacctccttttagcatctgaccttggttcacttaaactaattgttatcctttcagcagactgtgattctgaagggggaagaaacactatactgtgaaacattagaggagtttttaacatttggggtataatgccctccatgtaaaatgtctattttcagtattaccctctccctgcctctactaaaaattaaaaaaaaaattagctaggtatagtggcacatgcccatagtcccagctactcaggctcaggaggctgaggcaagaggatctcttcaggttgaggctacagtgagttacgattgcaccactgccctccagcctgggcaacagagcaagactctgactcaaaaaacataaataaataacataatactaacaataacacaggataacaagggcagctctctggtgttccaaacatgatggtaatttatttaaaactagatataagtatatactttttaaaaaacatattcaagaaccaagcctcaaaaatactaaatttgaatgcactcaggatgcatgaatcttctgatttataattatcatgtatttttcctcatacagagctcctcctatgttccaggtagatgctgggtgctgaggatgtggaagactcagccccttcccttgtggagtttatagtctggggaggacagagatgtttgtgactctaatgatatgtgcatttccatcaacattctacaagttctacacattctactaataacatgccaattcagtggcactttatatatgcaagccaacatggttttttccactgacattcacaggttttaatacagaaagcaatcctgttaaacaatttaattataaaaattctactgtaaacattaaaaagcaaattcagtaacctacctgtggtcacacagttaggaatcagtcagagctgggatttaagcccaaatcttctggtcctacatctcattcttttgcctcagcaccacttaagccaaggtgagacagtgaattcagttttccccaagtgtgagatgcaaacaactgatgatgtacaaggtgatttttaggaggcccactcatggggaataagctgtgctgaattgcaggtgagaaagtgattggctttcccgttagttgtcgttcaatacttttgattcgccagggaaccttggtttgaggcaagcgttctctctcagccaaagaagggcctggcctcaggctccgaagtagtcaagcagcactgcctggctggattggatgctattccttcatttttgttgtctcgactttttctattatctttacctgaggaaagagttcttggcttggctgggcgtggtggctcacgactgtaatcccaacactttgagaggctgaggtgggcagctcccttgagcccaggggttcgagaccagcctgggcaacatgatgaaaacccgtgtctataaaaaatacaaaaattagctgggcatggttgtgtgtacctgtagtcctagctactcaggaggctgaggcaggaggatcacttgagctcggggtcaagggctgcagtgagctgagatcacaccactgcactccagcctgggcaacagagtgagactttgtctcaaaaatgatgcgaaatttcatttgcaagtactgtaaatgtatttgcatatacacgagttaaatttacatcattcaataacagagggaagtggtgaggggatgagggaagtgctgaaggtgtacatgagtgactaaaatttggaaagacctcgtgagttgctgctgagtcctcctgactgcctttgtcacttgcctctagggattctcatttgctccttcccatctgctagttgcaacttcccaatttcaaatcacattagtgaaatgagtaacgtttcaagggagtacattcagatgactacgacattcacccaagacctactgtaagatgatgatctctctgttttgagaggtgaattggttcttccaggattcccaagggtggctggaaccacctctgactctacagatgagtgatcagcaccacgtggaaacttccgccatgctgggatttctgctccataccagtgcaggctcattgttttcacttatttagaatctcatatttactcttgtagactaaggctgactgccaaggcttcccttacaagaagtaatccatgtgatctaaagtgagagtattcacattcttcagtaagatatgacatttggctaaaagtcagtctttaaataaaaggagagcctctatgactctacagataactttgggttataaagttccatacaagtgtttgcttttaagagtaggcattgaactttctggcagagtaaattgagatgtaatcattttttgctaaactgttttaaaagatatttctaaccttattttctaaatttctaaaataattatacgttctaaattttgatctttagttaccatgacttaagtattgcaggaagagcctgggaattgtgctgatgggttttataaattaataggtgtcaaaaaaagagtcacaaatatcacattaaaattcctttttctgctatacttattcatttccaagcctgtcatctcttaaaaaaaaaaaagtatccttagattttcagtcacatttgatggagtttatgtgctctgatttccgaggtgaggacatttaaaacttcacagctctccaagaaataccaggaagggatgtttgctttaaaaaaaaaagagaaaagagggacaagaataaaacccccacccaacttccaaatactatatagagtcagtgaaggaaaaatacagacatgggaggaaaaattggaaaaaattttcttggagacaacagcaaaaactggcagtcaagtcagtaaggatgtactgtcatcaaggtctcaggttttcatattagaatgagaatagtaacaggtggcctgatggagcactggctgcatgctgggtgtgtcacacatgttgagtctcaccgcccttcatgtggccatggtgtcaggagggagacttgctcagttttcaaataggaaagtgacagctgccctggtatgtttataacagcttactctgggacaagtttataaactggagggtggcaaagagaccagtcaggaggctactgcaataatgcaggcaagagatgggttggaggctgctctccaaaggaagggagcagctgaatttccacaaaaacatccatctgctctctagatgttttcaagatgccttttccaaggaggtattcttactgctctctaaggatctgggcgcatttgcacaggctcactgtcaaagtcaggtgcagaggtggaggaaattacagctcttgagtagtgtgaacctcccaaactctggcaatatctgcatcagaggcaaaatgaaaattactgtctctctgaaatttggggtgacaatcctrgagacaagacctaagcctagcatgacttatagaaacacagatactttcagmtgcctctaaaacagagcagtcctctttgggggacctgtgacagattgctcactgacatcactattttgacaccccattaaattaccatggcctctttgggtttgcaagggcactgcagtgagaacaggggcagatccaagttccagaatcttcaaagattgatctcattgatatacatgggaatcaagagataggcaactcaaaaaagtcagctttgaccaagttttatgtaataaatctaaacacatagaaaccctttggtccagcttctccaggacaccatcctcattccataagaagcagcagagagtcttgcaggaagaagtaatctggaaatgcaggctttgacttccaaactgatgaaatattcttgtgatgagcccttgagagcccctgaaggggggtgccaaagaaacaaggactccctgaaatgcagctgagagcttcatcattggcaacatgacagaggcacccagcctcgagaagacattccagataagggggagccccaggcatggctgaggatgtaggtctctgttattaaactgttttttagggaacaaaagaaaagagtagtgccggccaagaaagggttgaatatcccctaacacccaccgtctgcttcttacaattaatgccctactgacactcaccccaattatatcaaaatcatctcctttttggagccaccttattctgcgtcagtctctataatcccacagaacagtggccttgtccaaggaatgttcagcagccgtgaacactccgcagttactgtttccatgactatttccccttgtcactcacttgaaggatatgtttttttgctcttgccacttgatcaatggttctcaacttatttctgctccagtgctcttgagggctgtgtcacttcattagcgggagctgactaccacagtgcttctgaaggtgggaagaaaggggacttttgaaatggagcaaatttgaagagaaagaaaggcaacttgattgaggggccctccagggtgttcatactcacatcaccaggaagcatcgctgtgcaggtggtgataggactgtgccactgaactggctcattccataaaacgtggtaaccagaaatccttggtggcttaagacccatggccagggtgacttcagagtgccacatgcacagtgcaatgcatcaggcacaaagccacaggttctgagccagttttgaggccaaatggaggcgcactaagttcagagtggaatggccttggcttgggtcccagctcttctgtttaccagctgtgtgatttcaggggagccactcaatgtctttcatactaaatttccttatctatacaacaggattaaaatgctcaccccccaatagagcttcacaaacctcataagcatgtatggatcaacaggaaatatatgacattgctgtggaaaaggcacttgtaaaatccctcatacagagtaatattcaatagaataagaaacatattctaaagctcagtcagacatcatggggactgtttataggcatgaaaacattgtgtgtgtgtatatatatatatacacatatatacgtatatatatgtatatatatgtatatatgtatatacatatatatacacacatatgtatatatatacatatatgtatatatgtgtgtgtatgtatatatatacmtatatatacacatatatatatatacatatatatacacatatatatatatacatatatatacacatatatatatatacatatatatatacacatatatatatacacacatatatatatacacatatatatatacacacatatatatataggcggcaaacctcaatcccattatcaaaagagaaagagctattaggtaaaggaagataattgtacgataacaattgccgagatcatgatggctgctctgaatcctgcaaaacagaaaaattctgcacaatttcacgttggattaagttgcaataaaaagtggccagagattagcagcttctttaaaagatcartgaatgttcacatttagatttcggtttgtttagaaacctagttcgtgtgtctagattcttgttttcacccagtcctcacctctcttagccgtgaagcatcacatgctccttttgcctgcctttgttcaggacactggagaatgacagtgaccagtgaccattgccatcactgtgcctgaacttctggggcactctgccttgtggcccatcaggcaaagttaggtgtcttcagttgctttagtgctatagcaataaatagtttatatgggatctaataaaatgcgatgcttcgaagcaccagaagagaagtctgagcagaaaacaaagaaatttcacagactttgcatgccccagtgagttcatcttccttctttcagggtgatgattttagtcattttacatgcacaattttattcatatgagaaagggaggaaaaattttatttcagaagcatctaaaaaacttgactctgcactgcctgaaaacatactgcacattatgtacggccttgacctgcatccctttctttctggcagcttttctgttgaataggatttttttctccttttttaatatctaggagttgtggcatttttaacagactgcatcgttttggagtaatgttctcttgaggtgggcaactgagatgtataattatatcctgtggaaaatggtggcggtatgaggggtggggaaggaggttattaaatcacaaaaacatgtttcctattcagaaaaaaatgacagtatgcaggatgttcaatttccttctgctctgtgcccatggagagtacagcatcttcaagtggggaagtcattggtattcactggagcttgcctggtttcatttttattgttttggagacttattactctttcagagtggttcccaggtctgctgcctcttcgcagtatatatgagctaaggtagtcagaggaaacactttaattacattttaagtagaataaaagcataagtatatttatgaaaattctaacagaaggtgcagtgagaccattaacttaaatcccaaaaatacatctagtgtttttttcataataggaagttcatagttggtgtgttaaattatacctgcatatttaaaatctgccctaaacactaaatattgcctaaatgtgcatattatattcaaaatcccacctataaaacttgtgctgggagcaggggccatcattgcctgcctcacacacctgtccttaagttgctgctctgcagatgggatgtcctcaggggctaaatgatgcttttagccttggttccctcagccatccctcctgctctctctcattgggcctcttgttcaaaattatgcctgagctttggtcgaatttgattttagcaagcctgaacataattctgacaagggaagactctgaggtgagagttagaggaggagttggaggttgtgcttaaacttgaatgtaaggatttgtctcaggcatagaaagatgcaaggtgaagataagcaaaatttcctcccagagaccagaagccagtcgttggcatatgcttcgaaaatccttattccaaagaacaaagttcttttctgtcgcactgggaggattcaaaacctgattagctttactttcaacaagtttgagaggaacccttcttttctacaatataaattatttggtgattacttcccaagaatattggttcagagtagaattcttcttaaagcattcaatattcagtttctgtaattttaaaagaacatgtgtaacttttgacctcttaaagataaaaaagatagctaaagaaccttttattcttgcccaaagaaaaatgcacgggtgaacatcttacaaaatgtgcactgactttgcttaatttattaaaagatatttaaaagtaaaaaagtatgtgaaaaggaacataatagaataattgcatagtaaagttacacataacccaatgttatttgattttccccaggcacattttactgttgtgtttattagtgattatgcccatctcatggtcttccaaaaaaaaaaaaaaaggaaggagggtggactcacagggtcgttaagagaatcctcagtctctctagggaaggaagaataaaggaagtgtatctgccacctctgcagctgcacatctgtggcagtcccggctgcaaactagacatgaagcagtattctaaggcactgacggcagtgttcctatcccagttactgtacttgccctgagaattgttagccaggaaagcaaccaggggcacacagtctgagagatcgtaccatatcatggcttctctgaatattcagtggctccagagctacagatgaagttttattttctaactaaaaatttaaacaattggtttttgtctcactttaggcataagagggagtctaaagtaaatattttctcagatatcttgaacgtatatgctagaaaaaagccataacattcaaaactggatccatcttaggaaaaaaacatttttaatctccataacaaaaggaaataaaagccaaggcaaccaatctagaaagcctttcccttttctctctgggctcccataggtttattacttattttctaagccagggataaagactcgtggtcttaataatccaaatgtatccatggggaaattggctatataattgaaggaacacttacggaaaatgcaagacaccatcaccctatctgtatggagtcaggagacagtgacatttatctatggaggcactagttatctgaccttttcctcagagcatttctaattttgttttgttttttaaaaaacacattytgccatttatagtgattcatgtaattcctggataagaagttgggaggctcattgcaagaagttgaacttttcctgcagtggctcccatgcaatgaacacatatcatgtatgagaagaaaaattcctgttttatagaagtaatcaatagttaaaatttaggtgacatttttaatattcttttgttgtaaacattctttcagagacaagcagagataatcttggcatggaaaacaattgttggccatgtgtatttaagttgacttaatagtgttttcttctcaaggtcattggggtaagagtggtagagaaaaagcagtggataaagagtcagaaaacactgacttcggatctaggttgtgttagaagatgttgaggtgtctgtcttcatctcatgtccctcagctgtaagggacagctcatgtcctctcctccagtgaggatcaggtgagaggatggactcattcatctgcacatacttttgatgctctcataataagtgctcagagatggataaaacttgggccccatctgtaggaaaacattctgggaactgtagtgctcaaatgcagtacaattggttattatttcatttgttgatttgtgtctgtttcttggtcaccaattaaatgaaaataatacaactaaaataactatttttaaatacaagggctattggcagtcctgtgataaccacaaatgctgaagaaacacagctgtgatgtgagcatcattccccacaagggagcctctgtgtgtccagagagggcagggaccctcatgtggctcgggtccccacgtgaaggctcagggaatctaggggcattttctgtatgagttgaggctgtggatttactggaagacttcaaggtctcaaagtcacttttcttcttccatcttcctacaaaaaacaaaatctgagaactttttagatgggtggaaaaggcagagggaagtgaaattggtaattaatcatgacaaactcaaagtggaattaaatttttggaagtcaaatagtagttattactcaactataaaattattgtcattcatagagtaacaaagacagtattcagaaaaagagtatctgactttaaaatccctgaagctatttttaaatgcatgttatgtagcagaatagaagctacatgtttgaataaatcccctgattatataaaggtcttgttctagatggaatcaactagcgatttttaatgatagtatttgtattgagttaatttattaataacctgaaagtgtttttatttgtatttgccctgtatcatacagggttttactttttatattagtccattctcatgctgctgtgaagaaatacccaaggctaggcacagtggctcactcctgtaatcccagcaggtgaatcccaaggcaggtgaatcacttgagrtaaggagttcgagaccagcctggccaacagggtgaaaccccatctgtactaaaaatacaaaaagtcagctgggcgtggtggtgcatgcctgtaattccagctactcgggaggctgaggtacaagaatcatttgaacccaggargcagaggttgcagtgagctgagatcgtgccactgcactctagcctgggtcacagggtgagactctgtctcaaattaaaaaagaaaaaagaaatacccaaaaccaggtagtttataaaggaaagaggtttaattgatgcacagctccacagggctggggaagcctcaggaaactaacagtcayggcagaaggggaagcaaacacgtccttcttcacctcgtgacagcaaggaagagtgccgagtgaagggtgggaaaagccgcttataaaacgatcaaatctcatgagaactcactatcaggagaatggcatggaggtaaccacccccatgattcaattacctcccaccaggtccctcccacaacacatggggattatgggaactacaattgaagatgagatttgggtggggacacagccaaaccatatcactcttcaactagcgatgcatagtgtgagtctgttaatacagctgttcatatatagcacatctgatcctaccatgtttttgaaatgataaatataaggtaaaaactattatgatamtgaagtgttacctatgatcacgactaagggaccttaagatgagcagattaaacctcttaactcttaggtttgtagtgttatttttttcartcttctgtgttgtgttttaaaatggtgttgctcaactgttttattgggtggatgtacagrggacaagatctgaagcctgagggcagaacagacctggggctagggtcttctccagccagtctctgatgcaagctcggttgtatggtaacagcagtgtccatatccaccaggccacagaaaagacatggacttgacaaactatgtaactaattactggattccaaacataaatgatgaacacatagctcccactctcagggagtccacagcctggtggcagagacagacacagaaacaacagaggatgccaggcactgtccacttagtggtcagaatactatgcagcacacaggcaggcagagtggggcacagacatctcgtggcgtctgcgagcagtgtctcctactgcagcagtgctaagcaacagtttacctcatgggggagagttggacccayaaaaaggaataaatacattctacctagcgacagactaatctgaaaatattgtaaatggtggaaatggccaagacggctgaacaccacaggtgagatggagaccggggaggaaggaagagcttctgtttgggagagaactgagagaacttgaaagccaccctggagcacatctgaggacacgagtccctaatgccatgttctctggccccaaagcgttcccaaatggtgctctcattcatctgctcacccttcatctcttcctctttccctctctcttccttcccagtgggtgccaggaagtatgtgagtaccgtggcaaaaacaagaaatagctttactgaatcctgttcacttccatccttttcccataacctcctcacatagttgaccacataaaggtaaaatgtagtgtgaactaaagtggaaataaagacacacattttattttacttgtccactgagagtaggggacattttcattacaacttgaacaaaaaaaaattgaataacctgaagattaaagactccaggcatcatagtgccaaatccctaaataaatggacatctaaactccattaaaaatgaagagaaaactttggcagagtttattacaggattttagcctggaagtcatgaagtctcagcttacctactctcatgttttaaccaaagataacctttcttcaattagcaattagggagaaaaagacatcactgtatctcttacaagaatattgaaaaatgacaatataattaagaaattgagtgaaacattaatttctctgtattaaatattcagctgagatggggatgaacatgtgaccatttttactcggttatacagagaaattgtgggttcactcttcagcttccatccctgtgtttgtaaggtactaactaaaggaaaacaaagtttagaaaaagctaaatgaaatatttaaaatataaatgtagtgtaataatcccttgtctcatttctgtcggcattctttccttcttgacccttgttctacgttttttaagaacatcctccatcgttaagatccctctgtttactgcgccaaattgtaattctcagtctcactttccttctagagcttctttgaagggcagtctgcaccatgggactcggctaagaaagatgagaacagaatgaagaacagatacgggaatatcattgcatgtaagtgtcarcagtgtcattgtgctgttgtagaacttcctttttgcatctrgtaagattgaccaccaggctcatacagaggaaatttacagtgcaattacctccttcatccttctagaacagctggtgttaacgctcgtactaaagaaaggaataactgtctacccccacttcatcattgtactgttgtcgtgggccctgttttccttttagatttaaggtttgggtaacacaggtaacgttaagatgctgagaaggaaaatgcattttggatggagtaaacattatagtcctaatggttcccagctgctacgtgagaatgaatggaaataatgatgcacagcttgccttaatgcaaagagctcagagttctcagcaaacattaactcattaatcctgtggacactgggttaggtaggtcagtaatagccccattttaaggacaggaaactgaaactcagaagttaaatgatactccccatatcacaacactcattagcaaaagaactaggattatagcttagacattcccagtgcctgtgaaactgaatgttaccaacccgtaatgccttggatggtttctaagtcgagcccagcctcattaatgttgcgtagcaaygctgagacaygcgctagattgatgaaaccccttctcccagkgcccgcactatccatcccccacactaaactgctctccgtcatccatgactgcatcaaggcactgacaggcccgctgtagtcgcctaacataattaatactatttataaagatacataaattttaaaaagcaacacaacaatgcagattaggccaagagaacatctcgctcctcgtgtctcatttcttacgagagaacaaacttgggaggtttggttattccagaggagcaatctattagctttattgattgtgaaagtgctgttaaactgtctttgcctgagttcacatttcttagtgtgacagtacagattgtctaccagtgctgcccacagaatttcctgtgactgcagaaatgtttcgtgtctatgctgtcccagacggtagccatgagccacataggagtagctgcactgtgtacttggaatatggccgtacgactgagaaactgaattttactttatttcttgtttttgctgttcaagagtttgacaacatgaattttaaattgtatttaattttaactatttttaatttaaacagcccatgaggctagtggctactacatagggcagcacagatttcagtgtgttgtagaaaaagaaactggggggtagagtggagcttacatatgacacaaaacgtcccagctgagcacatgctgctttccctccggccatcaagaaagccagatcgccagtgttgccaggtataaatgctagcttcatgtgttttgtaggttggttttagagcgtgctgtatttagtagcattggagtggtcatgtcacagtcctttgtaggtaggagatgctgtcctgaggtctagggttgattactcctcagtggatcccatcaacacttgtgggatgcattcttgatactggacactgaggacgcaaaggccatggagatgagatggtgcccctgtccccaggacaaacccaaccgggcagtcagatcgctgtggcagtagtcyagcgccgtgacacagggttttgttgcagcctggtacacagtgttctagaggctcagagaaggaaaacatggtttcttggtctatctagactcttccaagttccttcattttctctgggagcccactgaagctttgcgctgttagaagaattcagatttctcctgatggctatgacatcctttccaggagtcccttcagctctgcaacaaactcacagagagtcttggaagtgaagtggggaatccccttccataccaagtggaagagacattgctgagcctataacctcatcattgtggcatcactgatgtggcctcgtgctgagcatacagaatgcaatgaatgtcaaggggtgtagccttgggtatgctgagagatccagctagcctttctccaatacaacattgagtctgcttcttcccaatgtatagtttagtacctcctcatggagacactgagatatatttttgaatcatgagtgaaaaaagctagcatttgctgagcacttacatatgccagacactactctaagcactttgcacatmgaaacccgctcactaacaacaccacgaaataggtagtatttttgtatctattttacaggtgaggcaattgagggataaagagggttaaagagtttcacggttaataaggtatggaggcaggattccaacccaggagcagcttttataaccactgctggatgggtgctgggatgactggtyccactggcttggttttcaccaggtgtggtggctcatacttgtaatcttagcactttgrgaggctgaggtgggaggattgcttgaggccaggagttggagaccagccttggcaacaaagcaagactctgtctctacaaaaaaattttaaaaattagttgggcgtgatggtgcgtgcctgcagtcccagctactcaggaggcggaggcaggcmaacatgaggatggccctgtattgattgtttcctttctataaaacgtctgcaggctccycaccacgttccaagcagrttttctcctttaaacctccagagatcctgcccatttgtctccacttggccygtgtgggtatttggtgtrcagctgcttgtcacaggaacactgaattctgttcctgtacccgttgctcgtcacagctggacagagagtatgtacttaaaagggtccaataatccatctcttcattcagtaaatatttattcatcactttctttttgccagactctgtgggaggcactgctataaaaagataatgaaggctgaggcgggtggattacatgaggtcaggagcttgagaccaacctggcaaacatggtgaaaccctgcctctactaaaaagacaaaaattagctgggcatggtggcatgtgcctgtaatcccagctactcgggaggctgaggcaagagaattgcttgaacctgggagatggaggttgcagtgagccgatcatgccactgcactccagcctgggcaacagagcaagactccagaggtctcaaaaaaacaaaaaaaaaggaagataataaaacacaagatactgccctcctagtagttacagtctagtgcagggggttggcaaacttttttctgtaaagggtccagtagtaaatgtgttagcctttaaaggccaatctcagtctcagttcagcttcttggctctgctgttttcatgcaaaagcagccacagacagtacagaaacagatgggtctgactatgttccagggaaactttttctgaaagccagacagtgggctacttttggcccacaaacagtagttttctgactcctggtttagtgaagaacagattccacaaggggaactttttcttaccccccagggcacatttctaccaccaggatagttttcaactctcaggaccctgaacttgggatcaattttttcagcaccccaaacagaggtatcagatgtgatttgtgtgtctggcacaatgttgtcagaggcgggatgggtttaaatctacctcctaccaccatgaatttgcagtctgtggccagatcaggataagacatgcatgaaataatagatctcaggtccataaataaatggagaatgtgttgtgaggacaccactggggacttgcaggagaagggtgagtggacgagyggcagactaatcaggaaaagacctctcaggcaaaagagaaggtcgtagggtttggagataggaggaacagtttggagtccttgtcctaccacatactggctcaatgaccttgggtgagtcatgagccttctcaatgtcagaatttcctgacaagatcacgtgttgtggaaatgaacagaaatgccacattaaaagaacattgatcgttgttacctgaaaaaaaatctcacttcttcattacttctgtgttactcatcttgagtttagcagattcattacttcattaaaaaaaaaaaaaaatcagcatgttgaagtctccgatccaagtgatgagctggtaggtaattcagggaccatcctgctccttactagtgagcacgtctatgtgcagtggcccacttctgcccaggcgggactctggcttctgtttctgggcattgcggtgggctgtcatttacccatgacctctggggctacgttttctagcccccaccgccctccatcccatcccttccagtgctcttttagtgtttctttactgggttgtgttatttttgtatctttctagggacagtgtcaaaaagagacttctctgtccagcctcctaatcttcctctcaccttccatggcgtcctgaagcccttccctgggtatccgtgttaccccttcctctagtttgctgttgcttcctgtacccacacacacataatgacccatgcatacatcatgactcacacgtacatagtggctgtttctttatgggcatagtgaatagtattaccatcccctgcctaaaaattatgtaactgtagaaaagtcagttccactgcctgtaaagtctgcttcctagagcctcggacttgggataacaccactaactagaataaggaattgggaattcagtcagcatatcttagagattcttgttagtgcttttcaaagaacacagaagtggtgtaatgatcacattcattgtttttgcagcagtgtttgcatataaaatagttttaatggtccttaaaactgtttattggcttttgctcttaagtaagttaacttttcccttatttacactataaatttgctgagctagccccttccaaatataaaccaacaccctacccaccattaccgcccctccacacacaagcatagccctcctaatactctcaacagttcctaattataattaactctaagcttaaggcacacaccaaatctccctgctaacgaggcagcccccttgcagccggctcctctttctagggactggcaattggagataatgagccagaatctgcagaagcttcccaggctcccttcctcctctcttctgatctttattcaacaagtatatattgatctgccatgtgccaggcactgtgccaaaccacagtcattctttcaacagatatttgctgagtgcctgttatacaccaggcactattctaggtgtcagcgagagagcagggaacaaagcagacaggatgctatgctggtgtcgtgctgcaccttcttgtggggaagacaggagcaattgctgagtgcagggtgtcaacacccatgttaggaggtgagcacccagcaaggaaaatgaagcagggaatggagattggtcagggtgggtgatgtttttagactgtggtcaagaaaagcctcccagaggggatgagatgccaaccaggacttgaaacaggtgagaagacggaggagtgtggccgcccaggtggccggtacagcagggaaggctgtgctgccggagcagcgggagtggggtaggggcagaggtgggagatgcagggactctggggtgaccacaggagcaagagctgacagggcacctgccctcctgaagctgatggtcctggaagatttcgtgggggagaagggggtgatgtaaatgattacaaaataaaattcaagttaagggcacagaaggagttaacatggtaccatgagaactcacaacgtggggactgagtgaggaggtatgggaaggcctccctgaggatgggacatggaaaacaactgaacaagaggggacggagcagggaggatgctgcagaattgggaggggttcatgtgaacagaccctgtcatgccggggagccccttgggtctgaagaactaaaggaaggctgggtggctggagctggaaggacaggggttgggcaagagaaggagggaggtggaagccagacctacagagccttctggggcaggttgaggacttttgtctttattataagaataacggaaacttcattaaaggggttgggggggtgttaataaaatgtcattggaaaatttagatctgactgcagagaaagtaggttcgaaagggacagctgttgaggaatttccagtagcccgagtgtgacacgatgatgatgttggctagaaagaaaataagtagatgaattcagaagaagtaatggacccaaccgaaagatggatgggagacagggtgaggaagacagaagagccagagatgactcctgcgtttccgacttactggaggatgaatggttagatggatgatgggcagttgaacaggtagacacatggaaggatggatggrccattcccttccagtattatccaggatggataatactggaagggaaccagctgtggagaggagctcaggttggcatgagatcaacagcagcttatgagtttgatttggggacatattgagatgcttttgaaacatgcaaatgcgatgccaagcagacagttctgtagactgctgtgaaatctgaaagagagggatctgggctgsattataaatcagtgacccatttcatgggtcatatgggtggtggtagaagccattggcaggaggaggtgatctgtggagggagcaaggagggcatagagagyccaagacccagctaaaggggctttaataatgggcggtcctgagacagaactgctcagcggtgcagggagcactctcatggagagaaggggtgctgctagtgtcctgttggtagatctagtagatctagtacagcagagactctgatgtagtgctgaggacacgaggtcccttctgaggtgggttaccatgccctcctactccatttcctaacaacgaggtgtgactaatcagtgactggagctttggacctaccccagattcttctarccagtgagccaatcttggttgctcacattgaaggcttcacttttctaacattttgttttatagcagtgtgcttctctctgctaattgagtgactccaacagcgtctttgaacgaagggaaccagagtttatagttaggtaagaatggcctggcagagcgagcttttggcattaaattcaggtgggcacgagcaagagagaagcagatggacacaatatgtttaggaaggcatagggtagaataaataaatccctgccaggattctgaagaataaagagagagctctgacacagggattagtcagtcagaaaaagagttagaaaacaaggcaagacccacatgaaaccaacaggaagaggaaaattcatatggagccaccatcatcgaactcaaacttcctgctcagaacctgcatggcagagctgggaaccgggtggaaacaagcagggagactgcactggaggtggcatctccaccgggtaaggcgccaagcacttcctgagttgcaggcacactgggtctcctgtagaccctaccttgaaacaagcacaacagcaatcctcagcccaaatgcagccacgggaggagcaaatccattatttgcagaaatcaattgtaattaaaattaatttccagmcttctctcagaggctaaatattaccttgataattgtgattccaatttaccttatatatgtcaccagtatgtagcagagagaaagaattggttagaggtgaaagattatcagtgatacactctatttctgccgctgtgggaatatctaatcacacacaagttaaaactgcatgactattgtcaatatccgtcatgtttaatatggaagtgttaaaatatttgaagttacttagagatatttttaaacgtaatgttacctgatggaaagggcagaaataccatgttctacagacttagggtggggcatagacctgccctaaatctcgcatcaccccagtccaatgcatgcctatgtacacggggggaaaacctcagcggattataattcttcaacgctaagcactggtttgttgtgacaaggtctttatgtgcctgtttcttacccaaaaatatctgcttttctctgtttcatctagtaaaggctttttttgagagatatgagacaaatagcaagtcgtttttatgcagatggagtttctcaaagtggcagagtttgttacatttcttgatggggtaacattgagttgtgattatgatataaacatgagtttaattttgatcatattcaagtcatgcatggcaaatagatttctttttctccaattcatacacattaaagaaactttgtacactgtggaaaacttggggaacatatcccagaatctcaccatccagattcaaaccctgctaacattttttttatgtttcattccagtcttcttatttttctatctcttgaagctgttgactttatttttttttttttttgctctttgtttttcaatgagaatagatgtgttattctctttctaattacaaagataatataaaccttgtggaccattaaagtagtacgtaaaatcataaagatgataataaaaatcactccagattttatcccctgcagaaacctcattcttccagttgtcccactgtgcatacctacacgtacaccaatgcgtttgattatttcatgtaaatagactcttattagacatgctgccttgtagcctgctcttcttcactctgtaatatgtcccagagatctttccaggtaaataaattaaaggcctggtaatccttttgaatgattttatcagattttttgcttgtttgcccaccattcttcagtctcctgtttatatcattgaatggttaccaaggtggtgttaggaaaaaaacgtctgttttagaaaaagcagtccttggcatggattcactagtgagggaagcaactagaggcaaaaatgaaatagtgcagatgaaaatgatcaggtcttgaattaagtcattggcactaataagacaagtgatagctaactttcccttacttcttattgtataccagctacttactaatgattacttatattaattcacttaatcctcacaaaactctataatataggcagtattgttattcccattttacagttggggaaactgaggcacagagcggtcaaataacttctccaaggccacacaactagaaagcagcataactgagattcatacagggattctggctcgggagcccgggatcctaacctccgtgctccactacacagaaatagggataggttgttgagcagataccaggagattaaaatgtagaagttattgaagagcattcagcatgtcttcaaacatttctcctgtttcctttttaaaagtatctccacctcctcttccctgaaagattggctgcttccagttttcagttctgccctgctctgctgttccccagtaagcatactggctctttgtgctttgaagattttattggtaaacttcaacaaagatgttgcttttattcacagaaaaggggtaatttttttttttttttggatggagtttcacccttgttgcccaggctagagtgcaatggtgcgatctcagctcactgcggcctctgcctcctgggttcaagtgattctcctgcctcagcctcccaagtagctgggattacaggcgcgcatcaccacacctggctaattttgtatttttggtagagacggagtttcttcatgttggtcaggctggtctcgaactcccgacctgaggtgatccgcccacctcggcctcccaaagtgctgggattacaggcgtgagccactgcgcctggcagcgtaattttttttaaggggaactaactgtactgtgttccaggcacctgataatactatgcattatcttatttggtcctcccagaactcctaggaaagtagccccttgtcacccctttttacagatgaagctcagcaggactccaaatttgtgcagatgcatgtgagttgtagagcmagcatcaaatcatggtcttggacaccaaagcccctgttagtttcatttcctgcaaaatgtgaatgtgaaatggctttggaataatcaaggaaaagcacccatgctggcagagaaatacagatggtaattaaaaactayagctcaggtcttctcaaacttagcakgctgtgtgccccagaaataccaagtcctcatagtcttgaccccgtggttttcatggttagtaattgacctgttgttaaccacaaaactgattgaattctacagatcttatgcctaggcagttgagttttccaaactttttcctcccttcaaccccaatggctagaccctggccctgagagagggcccctcccagctggtaagccttcaaaacaaacctgcagaacagggcttatcattggacaattggcatttctttggattctttgtctgagtgtctcccacatttgccagatgccagaaatgtctgtgaggcatttcctcataaaaatttgatatgatttagcctcaagagtaccccaaggaataactgagttttcctgaaagaatggttgatacatatttgtctttgtaattggcatctgattcaaggtgaatgatatttcaagaacatatggtgaggggcatccatatactgatttatttgccccaacagtctatatctgttgttttcatagtcatctgagagctttgtttgagagaggacgcgtaagaatctgcagtttctgtgccaagtcattcttagacgtccaagcagcagagcatgggggagctggaagagccaatcatttcacttctttagcttttacattcaccgacttaatgtgagtgatggtgatacttamctatttcttgtattctggaagacatagggattaacttgagaagtgctgacctgtttcagccaggaagtgcaatcatgtgatgatcagcctrctgctctccatggcagaacacatgtcccgcgttctccaccccaactggaccctttcttgagacttaccccacgctcactgctaacacaggtatctcctgggcttgaggtggattcacttatcagtgttcaccttattttatcactaaaacaaaaatacttcataaactacataatgtatgactgttatcctctattagaaagctatagaggccaggcgcggtggctcacacctgtaatcttagcactttgggaggccaaggcaggcagatcacctgaggaaaggagtttcagaccagcctggccaacatggtgaaaccccgtctctactgaaaatacagaaattagctgggcatggtggcagctgcctgtaatcccagctactcaaaaggctgagagaggagaattgcttgaacccaggaggcagagctttcagggagccaagatcgcgccattgcactccagcctgggcaacaagagtgaaactctgtctcaaaamaaaaaaataaaaataaaaaaaagaaagctatagagtcaccgtcactcctgccttgatttcatcagggaaagggaactcaccatctcaggaaaatgtgcctagcaaaagaattcacagggctctaggctgcaagtccatgaatgccctttcctaggatatcagggaccagagtggaacatgagctattattacaagggagggatggaaaaattagactttttttatttttggaaaaatacacataaaatttaccatcttaaccatttttaaggtcagtgccattaagtactgttaaaagaaaaactttagacaaattaaatttagccaggtttatttgagcaaagaccaattcatgagtcaggcagycctcagaaacagaagaggttcagagagccacacctacaagtgtgagwggcaggcttttgtaggccaaacagagaagcaaagtagagaaatcacctaattggctacagctaggcatctgccttatttgagcatggtgtgatgagtttggagttggctgcctgattggttgaaacccttcctgttttatgtattccctagcacatggtccaatagaaagaaactatgaaatataaatgcaagccacatgtataatattaaattgtccttaaatctaatagccacactaagtaacagaaaaagaaataaattacttaagtttagtaatatattttattaaatctaatatgtcctaaatgtcaacttttcaacatgcagtcagtataaaaaatataaatgaggtattttacattctttttatcgtgctaaatattccaaatttgatgtgtattttacacttacagcacaattaggattagcctcatgtggctaacagataccctattagacagtacagatctagacaatatagttacattttgcctggcttttaactttacataagtaaaagtatgtaacatatatctctgttatccagtattgtacctactaactacacataattgtttaagttcattaaaattaaattaaaatttcagttcctttgttactccagccacatttcatgtgctcagtaactagtgtggcctttgtactggtgagcacagatatagaatgtttccatcagcacagaaagttctactggacagcrttggtatatactcttctgtgtattgctttttttgttgttcaactatgtttgtatgatttgttcaagttgtatgtaaatgtagcttgttcattttcattactaaatagcattccactttattaatatagtacaatttatgtctcccttctgttgatggacatttggattgtttatagttttgtcaattgtaaacagtattgcttcagtacgtttcaagatgcacacagtatccatttcctcatggctgggtcataggtcgtggatgtcttcagctttactaactagcaaattgtttcccaaagtgattgtactaattttcatttccaccagcagaatctgtgagtttatattattccacatcctcacctgaacttggtgttcagacttaaatgttttgcctttctagtgggtatgtgatggtatctcattgtaagctgggctttttttcacttactgataaaaataaatgtttattgattatatatttatcaatatatatttatactattattttcatagaagtgtgcacacaggaggtgaagatgaatataagacacagctcctcttaaatagtttttgtttttatagagacagggtcttgctctgttgcccaggcaagtgcagtggtgtaatcatagttcactgcagccccaaaccactatgctcaagggatcctcctgcctcagcctccctaggactacaggtgtgctccaccatgctaggctaattcttttttcaatttttattttttatagagacaaggtctctaaaaataataataaaaatgtcatgttgcccaggctggtcttgaactcctgagctcaagctatcctcctgcctcggcctcccaagtagcttggtctgcaggcatatgccatcacatccagctaaggtatttttgatctgtaggagaaataagtcatrtctatagataaccatatataagagcaccaaaaagtgaaatcaaaggactattgacatttaaggaaggagaatttatacccaacaacctactccatatctctattcagatggtaaacacctcagattaaatatatccaacactgcgtgcctcatttccatcacccaccccaagctggcttttctccatggttcacatcttagtcaatggcaccatcttctgccctttttctcagatcagaatcctagaagtcaacatgatacctcttctcatccacaataagtgaactgatcattgtggtcagtcctaccacctaaatacccctcagattcagccctgtccactagccctctctatgctaaactgccattgatcccctaggactcttgcagtagcctccccattgtctccccactsccacagcccttccagttcgtcctcaacaatagcgggcatctgatgaaatgaagcacgcccctgcctgtggcttcccacggtgctcaggatgaaggtcctaatgacctggccttccctcctctctgttctcatttcccaccactctcctccctggcttctgacagcacattcaccacaccaaccttctttggtttcctgaacatactagatccttcctacctcctggcctgaatacacactatctcctggacttgaaatttaggagttctgccctctccactttccatcttcatggtttgagcttcaatgtccctttattagggaattgtttgctagctcttcagagtaggtcaggacccatgccattcactctcatagctctctgtcctttccaacttagcacttatcaaaattgtatttaagtcattatttaagcaatgactgtttaatgtgttttccattgccttaagtcccatgaactcaagcaccgtaaatctaatttgtttaacactacatatccccaacacttagcatagtgtttggcatatagcagatactcaaaaagtcactgaataaatgagaagaccttactgaggaggggacatctgagttgaatactgaaaaattggcagaatttggacagttagagatggttaggaatgattaggtaagagatttctagaagatgaaatagctcagtattctgacaatattagacaagcctgtattaaaactgaaatttaggctgggcgtggtggctcacgcctgtaatcccagcactttgggaagctgaggcaggtggatcacctgaggtcagtggttcsagaacagcctggtcaacatggtgaaatcccatctctacttaaaatataaaaattagccaggcgtggaggtgtgtgcctgtaatcccagctactcaggaggctgaggcaggagaatcacttgaacccaggaggcagaggttgcaatgagccgagatcgcgccattgcactttagcctgagcaaaaagaacaaaactccgtctcaaaaaaaaaaaaaacctgaaatttaaaaaggcactgtggacccattcaaggtatcttggatgatcctggaccaccacccattcattagcatggggaagagttcaatccttgttgctcacttgctgtgtattaggcagggccccacacatgggactgcagcctgtgcctctgtgctgtgaatggagtcttttggagttaggcatgtgaccttggggaaaggtactcttagggatgttcagattatatatgacactgtctctgaccacaggacattgtaatctagtagaatcaataaaagaaaaaagatactaccatgtatataaaggcaaaacccatctcattctgttaggaagtcaactgtacatgtgtcttacaggtttctccatcctgaggggagtaagggcaattgaatctggagaagtagcagccaagttaaattttggggtgtggataaactgaactgtaggagatgatggtaaaactctacttcagaggctctgttgataggaaataggaattcagtcctggtggagattgacgtccctaaagagaaccctccagaatagcctgagcagcccatgggtggtaaatcacagggaatgagcagcactcatcctgaggagctcagagaattcaagcacaaaatagacaggaatctgacgagggggtacaacagatcttcgagacaggcctgcttagattgcaaggttctaattcggtcggttgcctgccttttgaaaacctgcccagggaaagcctgagtatccaggaaggtgaacctgacctcccttcagaggagctgacgaaagcccagtgtgtgtggagtagccgtgattcagttctagggtgcatctttcattcttgaagttcaaatggcattgccrgtgcttgtggcacccttctgtgcagtagttgcatgtaggcactggctctcctaagatacacaaaagccataacaatctacacatgtccagtgcaccagctcacctcccccaaacccccaacrgtggaaaacatatacagggagccactggttttaagcagcaaaatgtgtcctaggaaattggttcttaaagcagatcaccatgaggaaacattctgactgccrgtgagtctgttcctggggttgctgttatctgcttggacatcatctgtaaaaacagcaggaagaaaaatgtggctgtccattacatagcccatgacaataataactgacatctatccatcgcttcctatataccaggcttttttatgatctctttatgtgtattattttgatgctcacagtaatcccacaaggtaggcactcttcatctccattttacagcgaaggaagcacagaaagattaagtaactggcccaaaaccacacgtgaaggattctaacccaccagcagcgattctcacccacacactcgaccccagaaattgctcatcccatagtctcctgtgagcagagcaggaagacatgacctcctctcagcttttctccttctctggcccagcttgtcaccacattccagataaacttattgcaccccaactaatggtaaggcactgacatgaaataatgtgactacctgtcatgaagtggaaagccccgtcaaggaaggaaagttagaaaattgacaccgatttccttctgcctgtgctgttgacaacaaacaaaacatttactcgacaggaggttaaactccagaaaccaatatgaaattttgactttcacccattagcatttcaaggaatgggtccaggtcaatagttgctccagtgactgaggataaaagggtcygtcatctgcagctcccctggcttttatctcaaaagctgtgggcttcatttctcacccactaacccaaaagaaatgttgagtaaagttagcatcagaaaaaggcagtagcagtttagaagcagggtttcccactgctctagcaacattggaagtgaagttttgcaaaatgttcttatcaggcccccctgtgctttcctttcagggcagctggcttttatctgttctgaatactgagttttagcatacactttaattggaaggaagggtccctctgctaaaaggaacagttatttaggtaaatactttttaaaggacatatattttcaaaaaacgamaatgcactttttatttcttcaaaagttattttgggggwaaatctgctatgttccaggctctaatctaarggccagggacacagcagtgatcagtgcaggaaaattctgcccttagggtgctattagcacatcctttcttttttttttttaatttttagttttttatttcaataggttttgggggaacaagtggtgtgtttggctacatgaatgagttctttagtggtgatttctgagattttggcgcacccgtcacccaggcagtgtacacggtacccagtgtgtagtcttttctcccttacccccttctccccctttcccctgagtcctcaaagtccaytgtatcattcttatgcctttgtgccctcttagcttagctcccatttatgagtgacaacatacgaagcacatccctttttaaaatatggatttggggccaggtgctgtggctgacacctataatcctagcatttgggaggttgaggcaggagaactgcttgaagccaggaatttgaaaccagcgtgggcaacatagccagaccccatttctgaaaaaaattaaggtaacaaataaaatacaatatacattttcaaggaaataattgagatacatcaatagtatttgcagataattttttttacyctggaaatacttaaatataactaattaataccataaatatgagccctctatagtacttatgtgtcaatttgtgttttcattgaatcctggacacagcccactttgaggcaggtagtgtcatccccttctccagatgaggaggctgaggcttggtgcctttatttcctggcctgtggtcacatgatggatggtgacagctttgctcttgctggctgatgcccgcagatacagataggacttagggaactcaccagtgactaaggctaggatcacatctgcacatcccagaagcctgcaccgtgagtttgtaatcatcatttgtcaaggtgggtgtcacagccttcaacatctcagggtttgtatgtgatttagtgaagttgctcaaacttccagtccaagatctacttatgtttgtggttcacaggattgtatgtaaaagtgtcaaacctttgtcaatgctttaggcccgtcaatgatcaaagaataagttaatgagatttactgtaaaatgttaaaaattacaaatccttcccaattttaatagcaaaatgggaagtagagggtgtgtactatttaattctttatctttaaagcagagtgtctgtgggtgatctctatgtaatatgcttacattctggggctcagagccacctaccagattgcttttgttaatcgttattttctgtcccttttcctttgcagacgatcattcccgagtgaggctgcagacaatagaaggagacacaaactcagactatatcaatggcaattatatcgatgtatgtattttattatttttaattgatatataattgttgtacatatttgggtgctatgtatgatattttgatacatgtatacaatgcataatgattaaatcagagtataaaactcagtaaacccaaccattctgacatgtaccagattgtgtgtctgctgaacgattgttggacatacattgggctcaatctaaaagcaaacacrtgaatattaccctgcacaccacagaacttaacagtgaagacacggtcactccttttctcaaggtagcccattcgttggtgaatttctctgtaacattctatgccttctttgccatctcatgcttatgtggactaagaaaatgttatttccatttttttgtcaacaactcatattattcgacacttaaaaaatttgtttgcatattaatgggacaaaactctctaattcctaatacggcgatttgcaatcccttgtcatcactgcacttttaagttgtcttcaaagtagtctgcatctgttcaccaggacttctaatgcaagcaagacatgtcattaaatatgtaggctgtttaattattgaagactgcctctttgttcattctgcatcatgttaacttaatgttttacattagaataaattctttaggagacagcatgttttcagttgaaagaatgaatgaaatcaaaagtagactgaaaaatcaagggaaagttgctgttacctccaaggcccgagtttatattaaacagatttctgctcccttgtggttccgaaggcatactctgtgcttggccttcacactattgcttagtctatcagtacttccatagacaggattgatccatatatatggattgttttgcttcttgattgaatattactgagatgctactaaaagtaaatagcatcacaatctctaagaaagttatctaaaaataactatgagaatgttatctttagtgctaattagacagatttggcattttcagttatagatttttgggtagggactggggtatgattatttcaagaatagttcatctctcattcatcaaacgaagacccctgcactattttgataacaaccaaaaccataccctctccaggttccatttattttttattaaagcaagctttcttcataaggtgcattgcacttactcttttaatcagcacatgtttagtgagaacctcatgggagtactcagatgttccagaccagttatctcctcctcacagtctcccaactcagaagctgagaagctgaaatatgagtgtcttatccagtccacttacctccaggccaactgtagcacaccttcccttgagaggctccaggggacaccgttcacactccagtcccagctcctgcagtctctactgggtccttgagtacagggacagtgtcctaggcatcttacttcccctgcacctggcacatgcctgaatatagagagcccttagtaagtgtttcatgaaacacccactgaaggagtcattgtgatcagattaggcatcatagaggatgtaatttgaataagctttaaccggtgagtaagtggaaatgcaggagagaagatattccagctcaaggaggtcacatacatgagcaaggctataaagtaatgaaaagactggattactgagtttgaattgtattttaagagagaagagccaatactgagggcctctttattctcttagtcaatagatcttattgagtacttgtgcgttatttacctttctaggtgctagcagaaaaactgtgaaccgttcaaaccaaaaccaaaaaaacctctgacccagtggagctgctgttctaattaggagaaatgggcaataaattaaaaagttaattctgtatggtcaattagaaagttgtatgtactgcagagaaaactaaagccgtaaagggggactcggagcgccagacctggaggccctgatggcaattttgaatcgagtggctcagtcccactgagaaggtagcaagtgagcaaggaagacaaggggttgagctatatagatacctggaagaagagcattctgggctgagaaacggcccaagcaaaggccttgttgtggaatttgtgcctggcgattttgaagaaaagcaagcaggcaatcattggcatggtgtatgggggcctgcrgagttccatgatatggggagaggtcatgggccaggtcaggtccacagttgtaaggactttggcttttactgtgagtgagatgggcagtcgttagaggtatctgagtaaagccgtgatctggctgctgggagggaagtgaactgcacttggccaggagaggaagcagagaagcctgctatgtggctgtgggaatcatcagagaggtggcagtggaggtgagaaatggcgagacccttgagctgcattgaaggtagagccagtaggatttgctggcagattggctacggggttcaggagggagagaggggtcaaggatgctgaggagaagatggtgtgtggaacagattcaggtaggggttagggaggaaatgaggagttcagtcttaggtgtgtgaagctttaaatatatattagacctcccagtggaggtgttgagcaggcagtgggtatgcatcaaaattcccaggaaaaggtctaggctggaaacaagaatataggattcatcagtgtacagacgagcttgaaggccatggggctggaggagctcactcagagaatgagagcagatggaggaaaatgtccaacaaccaggccttccacatcaagttgaaaagggagaaccagccaatgaaattgagaacaagcggccagggaggtaggtaggaagaaaaccaggagagtcacatcatggaaccagggaagaaagcattttaaggggattgattatactcatgctgccgatggccaagtagataaggactgagaaatgatggtgatgttcagcaatacaggccactgtggactctctgggtgacttcaccatcagatgagtccctcctaactactgggcaccttgttaggccctcggacatatagtatggataagtcaagcaaggttgttgcccttgtgggacttagcagccagtgagaaatgagtgatggtctaaagagttctatttaatattggtcatggctctataatttgagacctacagcaagtcaattgtataaaagaatgtgtttgcttttgttgttcattgttttcaacttgtttttaagggcaaaatgatctaacatgtgcatttaagttatctgagaaatctgagttttctcttcaagtttcttttttctgttttccaaccagttttgggcatggtattttgggcaatcttgggggacagaaatagaaaatattaagatccatggtgatatgttagctggctgtaattttctctgagtggatattttctttcccagatacttatcctacaatttttttgtttccttctttttttttttttttttttttttttttgagacagggtctcactttgtcacccaggctgaagtacagtggtgcaatcttggctcactgcagcctggaacccctgggcttatgcaatcctcctgcctcagtccccaaagtaggtgggactacaggtgcatgccaccacacctggctaatttttgtattttttgtagagatggctttttgccatgttgtgcaggctggtctcaaactcctaagctcaagcagtctgcctgcctcagcctccccaaagtgctgggatcacaggcatcaaccaccacacctggccctttttctttggcctcaatttttatctgtcttgtttcttatagggtcatgataaaaggaaggaatctttcagaacttctgcctctttaaattcctggcccttgctacagtagcatgtcatggtattagcagtgtttaagaatggttttgaggatcactattgatataactgtctataccagtataacagaatgtgtgttaaacccttggcatattgccaatgacatcccaaacacaaatgaaattctgttgcaaattctcagyttgtttgcactttgtaagagtaatgctcatgttatttcagagaatccataagttgttagtgtttcttgctcatccatcatctcatagccagttatgattaagttacccacacctttggtgcaagcatcagaactgttgtatttgatgcgccttcactaattaagagaaactcagtggtgctgggttggccatttaactttcaggtgatgcagctattggcgtttgtgtgcacattcctttcagcaaagttagcatgcgacttatctgctgtttatcgattttatgtttatcaaatattctcttttatttatttttagggttatcatcgacccaatcattacattgctacccaaggtaagtttatttctactttgttgtctttctttgtttcttttgcccacttcctatcattttgtacccacttcaccctccttcaggaagatattgcacatttattgcggttctagccatcggcasgtacactcttgccttcccatcagacattctggtcatgtaaatcatttagttagaacttcatgttgagatcattaggagaaatgtgtccatcaattccttattgaattcaatatgtctaccttaggagtaagttggacatttgcaaaagtagatgtatagatagccattccatcaatatacaccagctgctctctacacagggaactgtgctggttgctgctggagagctaggctgaatccagcaagcacccccttctcacagtggttgtgtttagtggggaagatgtgcagtcacctgtatgtactttagtaggtacagtggcaggtgacatctgtgagaggaacagatacagataaaacattagggatatttggagcaggaaggggttgctttccggtgggatgactcaaaaacygttttgtggcagaggtgagattgggaagagcccttgtgaatggagaaacatcatgagcaaagatgtggaagcagaaagttagttctcccaggtggaaagcagctggtgggtcaccttggctaaaggaaacagaagagctagaggacatgttgaggaagctcatggcartggtttttgggtgattttcccagcgtatgaagtgggtcatctgcagatggtgggggtcatgagggagcgaggttttagagaatgaggcatcctaaaggatgagtcagtgagtcaatatgggatgaactgaagaaggagtaagaagcagagaagacccagctaaggctgaacagcacatgttctccccattttattattttatcattgttttcrgcaataggctacatcccaggaacagtagcagggaagtgaaaaggatgtgatctgccaaaggttaggcatgggggcagggtgtacacagacagtcagtgacaagggaatcaacgatgccaagataattggggttggaaagtccaggcttggacgaagggcaatcagaggtgtccactggaccgtgaggagagggaaggagttaacagattgaggctgggtcccattgatgagtcatagcttaggaaaagaggcagttgtagccagagagcagaattccaatgcttggatctgcctgtgcagtagaactttctgcagtggtgggaatgctctctatctgcactgtccgatatcatagctacaaatcacatgtggctcctgcatacttgaaatacagctactacaaatgaggaactgaattttaaattttaatattgatagaaatagctacatttggttattccctgtggtggcattggacagcaaagctttggggtggaaaagctccagctatggctgaaatggagccactgtggaaactgatcctgccccatgcccacagccaccccaagaacctgggtgacaccacacagagtccacagtctcacatcaccactaggttactctgcacycaggtctagatgacctgctggagctcccactgtctttcatcatctatgacttgaagttggtaatggctccttccaaggtcactttgctagctagatgcaaagttgtctgtagagtttccagtatgaacctggcacaaagcaggccctactacatagaggttgctgaggtcttcaggaagcaaggctcagcttgagctcttacatatgggatagaacaaggatgcatgtcagagtctggtcctagacatctcctaaccctgctgcttccaaacggaattcatcaatgccgttagaggaacctgttgttaggggtttgaaattcattctgatggctttcagaatgttctgaattaagcctcacaacatcagatttaatacattctatgataatttgaaattaacagtttttgtaaattcgtgtgaaaatttgattgtaaaatacccaaaatactcccgagcttcatttctctccaataacttgattagcaagctatgttttcatagataacaagaacattaagttgctcttatttgtattttcaatattgaggccctctagattaaggtgactaaacgaacagctaaagtagagactgaaactgccaagtctagacatggctctttaccaggcttccttccctttgtccattctctctgcccctctccccctgtaagagattattctttaaagagaaatgccaatagagaagtcactttctgcagaattcatgtgagtgatacttaatagctcagtaaccctctctggcagcattctagtgttaatgagcaaatgtatttgtaagcagataagaaatagcaaatgtcatcagtttgcagtagacaatcagtctgcccttaatggagaagggcattgactaatgccctgtttaccaggtcgtggcagcctttccctggtacaaggtgggctgcagattggacttctcaaactggcagtactaacatcactgctggtggcggtgcagggagaggagggaaaatgaatgaatatttttaatctaacatgcagtcaagaatatacatatcatattaagaataatacattcataccatgatgttcagatgagaaagctagaatcttctattatataccagaagataatggactaatagccttagatcaccagtaatcaagatcactgatgataatcttcactaattggcatggacaggtagaatatgttcgtagatcacctttgttgaaaaacaaacaaacaaaacattaatacctccaagaggccaacaaaatgggcaatgaagaccaacaggcagatgcagtctttaaatgtcttcttgctctatttgtcctgtgttttgcactaacataattctttaaaatatattcacagcaggaacctatgaaactatacaaatggtgcaatttgctgacaaccagttttacttccaagagttagtaatgcacagatgttcatcaagttccttcaatacagaggacatattataaatttaagtattgggtctcctcctcccatccaccctcaattttattgatttttctagctgtaactgactttgacctttgataataatgggtgacgtttctgcaaattgaaagcatcccattcaagccagatctgttgcttttttagtattaatatgttcttcctatctccccttggtttaattgtcttctgtctggccactaatatatgatgacccaatattaacttcatcatgtctgactgaccagacattagtgcaacagtaacattcaagatttatgatttagcaaaycaggrgctcaaaggagaggaagtcatgtccactactgcatgtctctgtatgtagaggcagggcagagtgaagatttcaaaagcaggctcaagtgatgggcagaagagcatgcaagtgggtaggattgcccagaagtgatcgtatttcacaatcaaaatgcaaccttggagattatgtggcctgcaagctggatgaagccacacacataagaaccgactggatagaacacctgctggcctcatggtggcagccatgggggccctggataagtgttcttttgatttttgtttggttttgtttagagacatgatttcactctgtcacctagactggagtgcagtagtgggatcatagcttactgaagcatcgaactcctgggctcatgtaattctcccacctcagcctccaaagcatctaggaccacagttgcacaccatgcctgactaatgtattttattttattttttgtagatttaggatctccctaaatctgtgttgtccaggctggtctcagactcctgggctcataggagcctcccaccgtggcctcccaaagcgctgggattacaggcatgagtcattgcactcggctttgtttagttttaattttaaaacttacctcaagagtcagataactcagggaaagaccatgcaaggctgttactgaagaaagtgctgtgagtgtgttctagacatggcttgcacagtcctgagcatccttcctcacttctaagtgagcattttccagagtcatttgtgcaccgggatcccccaagaaagaggctcaggcctggtgtggtctttcctgtgtactgcatgctcaccccccaaaaccatatggttaatccagatccagcccctgctttctaagttatgatgcttctcatgacaacacaataaaaagcaaatgttcgatgatagtcatgtctgaaaatacatgttaattattattgtcttcaatgttgtaacctgagctatagattgttgagatgcacgcgttacttttttgagtttaggtgcctcaatgcccacttcatcatttctttctttctgaactgtgctaatttgacagggttgactacctgattggggttccgaacttagccttcatcttgccatatatagtttctttttgtctccatcagcattagctctgtacagcaccctgtagagtccaggactagagagaggatctccaaacagaagcccccatgcccacgtgagaacagggagacgcttgtgcccccaaccatgttttccataggaccgcccagccatgtgcactctggcccaaatgtccctcacctttggaagacacagaacttccttcaaaactaatgaaatatcaagatcgtttccccagaaagaaaatttcatttaaggtggttcatggactacccccaccccccaattttactcatgaattatagtaattctatggacctcaggwtatgaactttactttggtcagaaacattaaaagctatttggggataagacagaaaccatagacttaattaatctactttttaaaattatactttaagttctgaggtacatgtgcagaacatgcagttctactttttaaaaaaccatacttaggggttaacaaaatgtcacagattgtttataactatgtgaaatacattcctgaaagcatcaaaatttttactaactttaacaaactattactaaaatgtttactagcctaaccctgtagtaaaataccctagagtattgttataatcgttagtattttgaaccatggtcagtttgggttttacggttcatctcaggctgggttttctgcctatctgttattttgcattcgtgctgaaaagtttatgcctttgctcacctttcaacaattttagcaattataatatattagaaaatgctstctctgaatgacagagactagagtagcaggtcccatagctgatgtttattttgtaaaagcaggatgtagtagaaataacacatgtaccacagccagaaggctgggatccaaattcttgtgctgtcacagaaaaggtatttgaacttcctaaacttatttcaggtagagtcctggtgtttggtaaatagtaataatagtcaagaccttaccatgtgccagacagcattcccagcactcacacatacagagctcatttcatctttaccacaaatatgggagatatatgggattgtccccaatttataaatgagaggaaaggagacaaagaaacttgaaataatatgctccaagtcacagacctaaaagtgcaaaggccagattcaagtgtagccactgaactccagcatcaaggctcctccccacctcactatactgcctcccataggtgaccttggggattactttaactcatgtatgtatcaatgcttagagcaattcctggcatggagcaaatgccatgtatgcgtgacctgttactgtttttgagaaacagcacagaatcgcttaatcattaggaacacagactctggaactacattgtctgaactcaacccccaaccctggttcctccattggcaacttgtgtgaccttggacaagttacttaacatctctgtgctcatcataaatgaagatgaaaatagtctaccttgtagggagctatttatttattttttaacttttaggttcaggggtacatgtgcaggtttgttatayaggtaaactgcatgtcatgagggtttggtgtacagattattttgtcacccagataataagcataatacccgataggtagttttttaatcctctccytcctccyaccctctaccctcaggtaggtcccagtgtctgttgctgcctcctttgtgcccatgtgttctcagtgtttaactctcactaacaagtgagaacatacagtgtttgatttttccgttcctgcgattggtcasttaggataatggcctccagctttatccatgttgctgcaaaggacataatctcattcttttttatggctgcatagtattccatggtatatttgtactacattttctttatccagtctactgttcatgggcattttggttgattccatgtctttgccagtgtgaatactgctgtgatgaacacatgtatgtatgtatctgaatcacgcatgaatcatatagaatgatttatttttctttgggtatacagccaataatgggattgctgggtcaagtggtacttctgttgtaagttctttgagaaatttcccacactgctttccacaatggctgaactaatttacattctcaccagcactctataagcgttccrtcttctccacaacctctccagcatctgttattttttctttttaataatagccattctaattggtgtgagatggtatctcattgtgattttartatgcatttatctaacaattggtgatgttgagcattttttcatatacttgctggccgcatggtaccttttcaagygtatctgttcctgttttttgccaaatttttaatggggttatttggcttttgcttgttaatttgtttaagttccttatagactctggatattagacctttgtyggatgcatagtttgaaaatgttttctcccattctgtaggtttttctgtttattctctggatagtttttcttgttgtgcagaagctctttaattaggtctgatttgtcaatttttgtatttgttgcmattgcttttgacatctgaggaggtgtaagatctctacagcgagaactacaaaacactgcccaaagaaatcagggatgatacaaacagtgaaaaaatattccatgctyatggataggaagaagcaatattgtttaaatggccctactgctcaaagcaatttacagattcaatgctattcctatcaaactaccaatgacattcttcacagaattagaaaaaactattttaaaattcatacagtaccatagaagagcccaaatagccaaggcaatcctaagcaaaaagaacaaagctggaggcatcactttatgtgacttgaaactgtactacatggctacagtaaccaaaacagcatggtactggtacaaaagcacacacgtagaccaacagaacagaatagagagcccagaaatrgtgccacacacctacaaccatctgacctttgcaaagttgacaaaaacaagcaatggggaaaggactccccattattaatattattgaataataaatggtgctgggataactggctagccatatgcagaagattgaaactggaccccttccttataccatatacaaaaatcaaytcaagatgaattaaagaattaaatgtgaaacctcaaactataaaaatcctggaatataacctaagaaatagcattttggacataggccccagcaaaggggccttttctttttaataccyagtaagttgcccatttacaaaataatgtccttttttgctgaccttgaaaatatactcagacaaagcagagtaggtcttactaattgcatatgttcacatttcaaaatgtaagtagtcttatgtaaacccctaaatagctagtgacatgaacttttcatttctcacatgtgaacaaacttaaactgtgcatagttaagaagccttggaacaattcatagagattgtgatctgtggagaactggctatccagataggccccaccacatgccattgaccttatcaccgccatcactgtcttccttttatgctcagaggatccagatgcccagtgtcatctttgaggatgccaggtcacattggcaaagaccacagaaactgatatggagaaccagatgccagatagtcatttacaatgaaaactgtaaccacccatcagacagaactgccaaggtcaggcaggggcattctgtgtgaagaggaagatgccttggcagaagatcacttcatcatgaccagggcatctgaagaaggggtcggagagtttattcatgattcaataagtatgcaccacctgtcttgtagtgagttggcataaaacataagctcagtaagaacacaagaatgaatgagtgaatgagtaaatgaatggattgggacttacgatgtgccacgcaccacttagacagtagaatatctcagccaggtagagaggatggctcatgttggcccggcaaagccaaaatcctggggcagattttggtggcattatctccaacatctctgactatttctgtttcaagttaagggctggtcagcttctattcttagaaacactttctttacatatgtcagtaaatcaaatcctgtatttagagacagtccatcttgttaaactaactttgcttggctctaccctgaccctgtttgtgtaacccctgtccccatacatataatcagttttgtctgtagttataayttgtccataatttgaaaaagagaagcctaaaaagttccctccagacactttcagctaggaacaaacttttatgtgaaaataataaaaatgtggggagtgaaggtttatagtggaaatatttacagagcctcaaacactgcacaacagttcaaactttgttgtagtgccttcattctttttgctgtcartttgtttttcttctatctttattccacatacttctggtataggtttaataaggatttttcaaaaagataaatatggtttatattttcccagctcaaaattccccttcaggcctctgaagcaataaataatagtgctttgaatgctgcactcactttcctgggcaagccattccggtagtggagggttctcagagcgtcagtgtaacttctgcacactctgtaaagcagcttttttctcttgcattctggcctccagatggagatgaacacttgaaattatttctcagtagaattgaaagaacttttttttaaatcaaaagctcagccttcagtaaacaacttttgtttttattcttccaagaaccagtgcagcttgcacttcaagtgcaaattctgtgttagctagcactgtgcttcctggcaaagttgttcctgcattgtcagtgagttgtaggttatgttttggattcatttgttatgtcctatttgagactaatttaaaagtattacctagtgaagtggagtattctctggtttccaaatttaaatagggatgctttgagaaaatgtgatttatatacaggcgaacagtgactccataaaagtcactgtcgtaagtattccagckacccagggccaagtttatacagaccctgcctgcattttaccaaccatctgtggttttacaagaragaatgaacaattgcaattagcagcttatccagaaacttccttttaaacaataatttctcttcactagattaatttcaaaagatagttgccaattagccaaatggtcactttcatagacatttctcatccctgtgctctaaataaacttgctcattagcaatgagaacatttaaaggaagagttaaarttaaaagatgaagtaaaaaatagagcatgtcaggtaacatccacctatgttgttatagatgccataaggaaaatgtggccctctaataagagaaccaaaattaatacagaataatttgaaaataaatgatgtcctgttgttaagcaagcactcagatttaaggtgtcttaaaacaaatgctttttaaaccttcaagagtatttagaggggttcctcatttgaagtagaaaatttgtagaatcttttagaggtgacagaaactttaagaagctcacagtccagtttccttgttttgttattataacagttggcacttaaagcagaactatatttaagtgaccttcatccacataagttcaagtgagtcatatatgcaaaagtatttgcaaactgcatggactaacgttcatattttaatagagtgtgtgcaaagttcaacctaggagaaacgtcatatgttaagacagacctgttcccccatagggccttttattcaacaggaagaaaaactgtgaggttacatctttctctcaggtkcagccctttaaaaggagagagctgaaactaataccyatgtactttccaaagtgctggcttccccgtgcctctggcaacatgagtccttgcaaagcaaagctactcctttacagcctggttcattcaaaattgaacaaaggtttctgtgcacctgtcacttgccaggatcagcacacgatccggaatataccagtgacttcagaattacccagtgtggaggtataaataaatgatacccaactcttactaatttgtgattttaatgcacccacagatttggggacttcattttgatttttaattatttagatttttttcaagagacatggtctcactctgtcacccaggcaggagtgtagtagcatgatcatagctcgctgtagcctccagctcctcggctcaagggatcctcctgcctcagcctcctgagtagctagaactacagggataaacaaccacacctggctaattttttattttattttttatagagacagggttttgctatgttgctcaggctggtctcaaactcctggcctcaagcaatcctcctacctcagcctcccaaattgctgggattacaggcatgaggcactgcacccaacctaggaacttctttaagccatttctcttctccacccctaccccattttacagaagaaaaaataagaccragtgcagccctagaaccacttttccagaaatctgggcaccaggtttctttttcacccatgggcacagtttaggaccagtttttcaaggcagcaaacagtttaggaagtttctagctataaccagtgactttttttcttgccttctcactcaaaaggaagctgctggaaatttcctcatgcaacacccttcactgccatggaaaatttgagactgtctgcactgagctatgtctagggagccaatttatctgtatttcattcatttattagatttattctcttttttcttaaataaaagaggattccacttgtgtamtgagaagagcttaattaaggaagatagagactaatgaaagcttttatttctctggcagtagcccctgaagcatatgaatataggctgttcccttcactttacttccttgacagaaggcagccagatcctttgggtcaccaaacccctccattctgaaggctgccgttcattttttttttttttgtcctygattgccgtctctctgttcccctctttacagcatgcgcaagtacccaagctcagtttctgagcgttctctttggagaccgacactgatgaatgctctgtacctccgccagcaggatgyttctgtgctgtggacatctgtcatgttccttccttccgaggccacagcactttctcctgcgcctcttttyagctccccatgcatgccgccattcggtctgtcccagggatcagggactgaaggtccctctggaagcagtgtctctatctctgcattgtatagcatattgttgccacacactacctacccccattttattcttttctatattagagatcctctttggtgccctaatccatatcccatcactcaaatctgatgggtctgcctttctcgacctgctttctgtgtcaagaataatagaaacctttgcattccttttcacagtggtaccactgcaacctgwaatagtttacgtaactgctagggaggtccgattctagaagaggactgaatatcgcccaaaaagaatgaaatgcaaataatggtttctttcggtagatggagtttccagaaatgctttggaacatttcaattctaagagcaagtcatgctaggctacaaaccaccccattattggttttacccatagatatctctttgctttatgcaacatagtcacaatcagatctcttcaacttgttcttaaaatttcttccatatacaaccatgttttatgtcagtaactaggccaggactgtccgctccccactaaaagaagataggcagaatggttaatgaaagcctacactctagagttgcacagcctaggctcagatagcagctctgcaagtaacctctcaatagatattagctacttattgttattatcattttgtatgttccaaaagacatatctctcaatagcagagaagcagttcaggttttaaccctagtataatgtatactcatatagttttcatgaaagctgatacatcctacacctgwtaatgcttccttccagaaggatgtatcaaagggagccacttaagtgtgcaccaacatcctgtactccctccagagtacaaagagtgccatcattgttcactgttaaactgtagacaaacataggttggaaagacaacagctgyatcctaagctggaaaagcatattttccttctgtttttgaagtcttgctgaaattgagcagccttgatagcagcgccagctccacgtcttggtgttctgaaggcttccstggtgcacacttaaagtcagatgacatgtgagtgaaaacagcttaattccaaagaccagacaagttccttcctaasaggcttcattgaaagcagttcctgagataagaattacacaggggtgttttagagaggagctttaacatggtaagttccttatatttcttaggaagaaaatggctattgattaaatttatctttattataaagacatactaaataatatctactatgtaattatttgtcctttttgtktttaaacatttcataatcattttaattgaataaaygattaaaagaaaagattattaaccagaaaagagaaaatagatgatggttgaagggttgtatagcatattatagacagaggtttcccaggctattttagtgtttatttaaaacctgtccgttaatgtttggtttatgccaattttctcttaatgaaatttgacataaccttttggtgtccaatcaggatttcatatgttttagaaatacacccagaaacaaacattccatgaaactaaktatgtagagaaagccacaaatagtcacatggtttatattgtcacactttcttacttcagtctgaaatgagaattttggggaatggaatgagtgaaatgtaagcatcaacatgtgggttgtgtgcgctggagaaaaggctaatcgtggatacagcggaaagtgtatgcctgattttaggtataagaagagtacacacctgcaaggcaatttagaagaaattgggcaaacagcaagtacccgccaaccagagagggccaggtgaggggaaaagactcttgtcacaggaaaccctactccagttgagaagagatgtgtcattgtgtggcatcactgtaatttattaacaaaacactctttaacatttattatttaagtcatcactttcaacactacttctaataaggtatattttattatagcttttctcttcttttactgtcaccaaattgaaattccagtggaccagtgaacacttctaaccctattatgtaattctaggcataaagagtttttcrtgtgagagttgtccttagaaaatgcgattttaacaggccagttatatttttgattttaggttaaagtattgccgagttttccccatcatagaacaattctcagtgtgtttgcttgtaattcattagttgatttccattgtttcctttaaatggtaattttcttgggatattcttagcaattcgggataatgagcaaatcatgtcccttrtacccacccatctcaactttgcttttccttttctgcagctgaaacaaaaaatatttcatgaaagttgcatgattttaacataagtagcctcaggggagaacaaatrcaactatcaaataagtgatgttaaggattattaatgctgaagccaagtatattctgtgtcactgttaccacttctgtgacacatgaggcagattcagtttgtaaagcatggtggcatattttaccgtttacatctcactactgtaaaaatgaaaagctactcaatgtaaaattatagacttaagtgttatggaagcatcatattgaaaaatsacataaagctttataataaaaacttagaaaaccactgaagggacaactagttctctaaatgttgagtaactgacttcgtaacccttattatagattatcaccaacagcaacaggagcaatcatggatcaaaaatttaggaccacttttattcctgtagcaagagctttaaaatgaatgcctctcaggctcatcgtcttctgtggttaagtcccaccttcagccatcttcattgctgatggagggaactggctgccagtgcccaaaggagggagcccaggtttcctgcagctgctttgccttaacatccctcccctttcccttcgcacttctgccattcagtgtgtaccccyacccaccacacactccctccttcaggtcccagaaccacgctagaaacaaacattctggtgatgcgctcaaacgggccctggtctcgggcagttcagttcattctgcagtcagaatagtggtgctgggctgacctgaattggaattccagctttgccacatacyggcagtgctgctgtaacaaaggcacttcatctcctaagcctgtttcttgggctggagtaggtgcctcacactgctgtgttggggaatgaatgagatcgtgcatataaagagcagcatccagcacctgcctggcagggagccayctagttgtacctatttatttgtccaacacccttgtcctgggttccccttattccagcctagaagccttggttctcttattgctgacagagctttagggatggcaagagtcccccttggttttaacactgtcttcctagtacagccccagtcctccctggtctgaatcaagaggtcagcctatccaccaatcccctggttcctgagcccacctgagcctcattgccacactggggagccttggagcccacgctggccctgccagccacacgtggccggcttagggcctgccccctgccctataggctctgaccttcctgcccccaggctctccctgtgctgagccatcacctgcagccacattgctgctgtctgttggattcccgacccatcaccacctggacatttctgctgcagatctccgccagccatttggatgcccagggagctgttcttgccataataattgtaaaattataaaatatgtttaaactttgcctctcattaatcaatacggaccatctttttgttcactgttctttactgttcacattcaacatattcctgtttcttaggagttgttttgttcaatggaaagagtagacccttctgctctggacactggcrtctgtccagaacatgcaggagagctcagtgggagcctttggacttggctttggatagctgggctcagtttaccatttctctcagcccaccgtaccttgctcctcctgttcccacttcatcctcagctgctgatggctggtcacacctaaggctgagcccacacctgatcaaacctccttgcagtacaggtgccccccgtagagtccgttccaacaacmaaacacttcttcctctgttttctttctctgatttttcccgagctttgattctaaaaccggaactttccttagtcatgttttttagtatctgtcatggttgtcttccactcctaaaatctgaacttgcaaatcttatcagaattttacatttcctacaagagggccccatgggagtctccttccctcccaagtggcaacaagtggctcctgctggaggacctgctatccccaccctccctcccctctcccctccttcagagtcataccctgtcctttgagacctatggcaggtacctgacttcaacaatgctagtcctgctactgcgtcgccagtcagacctaagctcttcctgactttgactgccacaggcrtcctcatacatcagttaccgaccctggccttcagacttttcttcttgtgtatccccaaaagaagtttgaagaaattatgcacctgctctaaacatttgagtttgatatcgaaaactttcatcacatgtttatgtaagtgtatttgttaataagagatagacagtatgaaatactttctaagacaaaatgaggattggtgtaattaagataaatattttatgatatgtggtgttttttaactgccttacagattcaagcataccaaacctgaaagaaaactcatgaaactttcacttacgggtttcatccaagaaaatttggctctcctcgaaagcattctggttccatttaaaagagtaaatatggccaggcgtggcagctcacgcctgtaatcccagcactttgggaagctgaggcgggcagatcatttcaggtcaggagctggagaccagcctggccaacacagcaaaaccccatctctactataaacacaaaagctagctgggcgtggtagcgcacgcctgtagtcccagctactctggaggttgagccaggagaatcacttgaacccagaagccagaggttacagtgacccatgatcgcgccaccgcactccagcctgggtgacagagagagactctgtctcataaaaaataaataaataaataaatagtaataaatattaccaacctctackgcttcaagggttctgagttcagaacatcttaacataagccaaaatgctaagttttactcctcacagaattgtttcagacagggaagtgagtttctggagccagaattccagcccaaacctgtaggtttttacacctgggcagtgccccatggtcatatttgagataggtggtttttcaagtgtatgaaagactattgtgaggctggacacagtggctcatccctgcaatcycagcactttgagatgatgaggcaggcagattgcttgaatctaggagttacaaaccagcccgggcaacatagtgagaccctatctctaccaaaagtacaaaaattagctgggcatagtgcctgtggtccaagctactcaggaggctgaggtgggaggatcacttgaatcaaggaggtcaaggctacagtgagccgtgatcataccactgcactccagcctgggcgacagagctagactctgtctcaaaaaaaagaaagaaagagagacagacagagacagacagagagagagaaaagaagagaggaggagggggagggagaggaggaggaggaggaaaaagaaggagaagaaggaggaggaggaggagagaaggaggaagagaggggaagggaarggaaagggaaaggtagggtcacacctgtaatttcagcactttgggaggctgaggcgggcagatcatgaggtcaggagatcgagacgttggtgaaaccccatctctgctaaaaatacaaaaattatacaaaaattagctgggygtggtggtgcgtgcctgtagtctcagctactcagaaggctgagccaggagaattgcttgaacccaggagatggaggttgcagtgagccaagatcacgccactgcactccagcctggcaacagagcaatcgtcaaaaaaatgtatataataatacattttaaaaagaaagaaaagaaaagagaaaagaagtggaaagaaaagaaagactattgcatatggaggctggagactcctgcctagggaataagttttggcagagtccttatagatattaagtatctggaaattaatacttgaaaaactactcatatatgccttagatcgtctttatgtatctccaagggtatgcatagctcagtttgaggaggtttttttcaattttttgagacaggtatgttgcacagactggtctcaaactcctgggctcaagcaatcctcccatctctgcctctgagtagctggaattacatcagttgaggtttaagtgtcccaggatgtttgccttactgtactttacatgagagtgtgggctgttcttatcttatctctacctyagaaaatttcaagcttctggatggtggagaccatgtatgtattactcacctttacatctctactatacctcacagaatgcctggcatttaacactaggctgagtgcttaactgctgcacgcaggggtggccactcatacccactggggccrggacagtggtataaacgaacaaagcaagttaggcatgaggccacgttaggaaaatgtgcatggaaaacacactggcagcacaactcactttaaacatcatgaagaaacagggagcctccacttgggtcttggaaaagtgacctgaggaagtgacttttggactgctcagctgaaaccagcaaggagatgtgcaggctttaagtgacgcatcagcagaggggggtcttgcgggaggacgctgggaaggagcgtgagggagatagatggtcagggaggggcaggtgccctgacacagtccaggcacagactgtgtgggaccgcatttgccttattaaagaatttagggcttactctgagagcagcggaaagcygtgggaggatttatgcaggaaaatgacatgtggggtttacagtcttcatagatgagccctggctgagggatagggaacggattcaggggaggccccatgtgggtttggggtgttgtattcatccacttggtaaataggtgagttgtcatggtggctggggtttggagggggacagaaatggagtggaggaaacagggtgtgctgtgctcttgaagtagtcctaccgggtaagcacagacgcttgggggctggctgtgcttgtgaagctgaatttgattctgtatcagtgggaggcccttggattggagtagttaaaggagggaagtgacctgagrtcatgtaccctagaacttaaagtataatttaaaaawawatatatatatatggaaaaaaattaaaaaaaatgaaaacctagaaagatacaaggttctatgtcattacattaaaattgtaatgcttaaaaaaaaaaaaacacctttaaagaggtggtttcagtgtggttaatatgggttctctcctgttttcttcttgccgggattgtgaggactgtgtggtacacacctgtctggtagagcccttctgagttgcttccgatgttcaaatgaggcggtatgatgtaatgcagtcagacttctggttcaaaactcagccctatagctcactagctgtgtgaccttagacagcttgtttgacttcccagtgcctcagtctccatcagtaaaatgggggtgagcaataggacctatttcataggatggtgttttctaaatttaatgcaatagtacatgtaaactacttcaaacaggacctgggaaacagtaagtgtktaagggacattaggtattattctgtttatgatggaatgccaatttgtacttatattatctttctttacttcaaaaaactcgaaaatgccactgtgagcttaagggaccttgacttctcagcagctctagttaatgtagaaaacatagtgtatagaaattcaaatgtgaaaagcaggggtacaagtcatcaaggtttgaaaatgatcatttttatagatgtaggggtacaagtgcagttgtgttacgtggatatattgcttagtggtraagtgtgggcttctagggcacccatcacctgaatattatacattgttgaaacgatgatttttgatatctctcacttcccatgaactagagaactcatcttatacaataaagcccatccttgaatgtctttcattaatgcttttcattgcttgttaaaggttaatgttttttattgaaaaaaaaaaacgttccgcccccttttttttccctttggggcttggtggtggcaggaatggccccctgcacctttccttctcagtagaggtctctgtgtgcctgccagctggaggagacggaatgtattactggcctgatattatagaaatttctagatgttacctttcagatttcccacagggggacaactgctgagattaaccgtgttgcctattgtgcaaacatctgtaaacgcaccaccacagcaattgcagtggctccccsccagccagaaactgcggaaatcaaatgccctgtcttgcaaacacatctgttcacaccttgagagagggaggcttttcagagctccttgctctgaaaaatcttgggagtttgtttgtttgtccactctgtgagcaatccacagtgatcttgggagtcagaggtcaaaggcaaaggcttactgacctcccatgctgttccccctgtctttargtccttcaagggcatgggtgctaagaggagcctccctgtgtaccaggctcacatctttggacttgtgatgttggctcatgatggtcgtggtcactcagaccccaccaggagctgctgaatccaaatggagtagctcttggtgacagtaaagtccacccctcccctggcctggagggtatgttctgattttgccaggagacaggtagctgagtaatacttgagatcttgggaaatgatttgaaatatgtggaagagaaaagaaaaaacaggattgatacattctgcattaaaaaccttatttgggcaccttccctattttctaccctcaaaaaaaaaaccccacaaaaaacaggatttgaatgaacatttggaaaaatgcctggaatcatcagccacgaatcaccagtgcccacccctgagcaattttactgtagagccaccacagtgaccaggccagggagggagccatgcgtgtggcagaaggaacggccgccaagtgttggctgcacagcgccccgcgcctgcaggagagcggagacaggagaaagcgaggccagctgcactgcagggagatgtctctgcctgtactttttttttctttctgggatctatttagaataatctttgtgttcaatttcatttttagattttaacacygaattctttttgttcttctggatccacatatctaattttagcattgaaaagaatttcacctagtttatttttgtatcctaatctttttttagcgtaggtcaatggataagaaaatcacaaaaactaagtgtatattatcagccaagtgagctgctagtgcttataaacaccctttattttaaagacaatgcgaatttcattatgtaaacatgtaaaaacccaggccatcttaactgatgcccagccgcagaggtgaggtggcatggtcatgttcctagatgacatgttatgaatggagttccttctacatccragcaaaacaggattccatgattcacagagcttgcaggcaaggttagactagtcaggagattcagaacaaacaaatctttggtgtttcacagttacaactccataggagagcacctgatggttatactggaagacgaagccgatgtccttgatgctatagatcaggagagatctgaaaacacacccagacccacctccaccccaacccagttcagtcagagtctcttgggttaggacctgagaatttaaaaaaatctccacagtaattttaataagcagctagagttgagaamcattgcctcccgtrgagaacagtcactgggaagctaggattgtactgtggttacctagggtgatggactgagctaagctgaaagcagagccttgggtggggaaactgagaggagtgatctgtatagtgcttgggagcagtggtttaattccagagctccaaggctgtgctgtgaggacagtgataattatgctccttctgaagaaatccttgcagaagatgtcacctttccatgaattgaaaaggaggaaaggtgctgtgttttsaagcttctccagataatcttagaaatgtaagtcgagaaagggaatcatacaaacatcatgtcttaatttgacttagtacctagtatgggtttaacataacactgtcataataatatggtttacacacatgcatacagacttaccatccattcattgattcactgggttcctgctatgtgccaggcatttcctagggcactaagaaaacagcagcaaacgaaraaggctgagttcccctccgggaggggtcttacaccgagcaatcccagaatgtcggctggcaagaaggggtgagtgaggaatatgctggaggcagaatggggcccctagcctagagtgcctatgagaagacccctgttgggccctgacaagggaagtggctttgctcttcctgcaggcacaagctgtccatgatgctgggacctctgattcatccactrgagccattgtcatcagaactatttctggaagtttctgagtaggtggcacagccctgtgtacctagtgaagccccccccccctttgattcaggggtcacattgggctgtttgcgcaaagaaggactcactgcttctttttccccttgtgaataagtaacaagctgttaagtacacaatgaatgtacctctctgcaagccagaactgtagtgattgatggaatccgatgtttacttgtcccctctgtaaccttagattaaagtcactgaaatcttcagcctctacatcaggagaatggcacgcacatgccaagggacgtggccaaaatggctggtggagctttgtgggaggcagagtgcatggtcccttccccaaagggattagatgcagagacatcaggagagcaagtcagcttttatggggagggtaacagtgtagtcagaagcggcaagggagaaatgataggaatttgtgttgtggagagaaaggaaggaggcctggacagggaggaaggagaagaaacattacacaagaaccgattgctaattggtcaagagggatggggagtgactgaagggccccttgggtgtgtcactattrttcagtgtccaggctgctgcaaaaggacagctattaataaacatcgttaaatgcatcttgttttctttctattgctttgttgtttataaaatgcctgagtatacattaattccaagaatcctcaaaataactttgagaggtgttactgtgatcagtatataaagaaagaagacattgaaactcatagaggctaagtaacttgcccctaatcacacagccagttaaaaggcagaagcaaatctcaaattcaaatatttgagctccagctcyrgcaatctgaaatgtcaagatacctagtacaattgggttctggtcctggatgtgcctgaacatttttatgatttcacatatatcatgtgactctccaagcctttgaagttgcatttctctcatttccttgcctttctacatgtcttataaagatttctacgcttacatttataccctcaagtatgcatggacacaaagtcgagtttgggtttttttaaaatctggattaaaagaaattttaaattccaactttctttacctgattctctctgtagcactggccttttgtaatatatatttttccagccataggaaagagctttttaatgctcagatcccaagagctaaggaagtagatggctatttatgttctgccaggaatctttatgttcagtgagaggaagtgcaactgcttaaaactcttaacttctctctctyactttagaaagtcaagcagaaaaaaaaatggattaatttgacagatagcacagaataagaaaaatattagaaacaagaagaggccatttttcctatagaggctcatttcattctatataccacttccctgggatatctgctrattgttagcagaaagagtaatgttatctattttttaaaatttcactcttgagtactayggagataatagctaaatgatggasaaataactttctttcacggtagtagtttaagaagggtaaaaagagctcaaaggcagatgtttgatgacatgagaaaattcagcgacaaatgacaaatttgatatttctataggtgcagttttagaaagagtatctttttgcattgacactagagacctgtgtccatctgtacaagtgagggaactgcatgtggrtattaatagatgtatttgtaagccccggaaattttccagttgaaactkacaacaaaaacaaaaagtttctgttgtgttttgctgcagggccaatgcaggaaaccatctatgacttctggaggatggtgtggcacgaaaacactgcaagtatcatcatggtgaccaatcttgtggaagtgggaagggtgagtggaccrtctgctgcaaatggccattttgttccttgcttagttggtaacagaaagtaaggcatgaggcaagcttttgaactattatgtgtactccccaaaacattaactactccagctcctcctattgcttgctgcacttgcttataaattatcagtaaacatagcctgaattgctttcatttgttgcgatagcaacagacaggaaaggcactcaagatttaaaagcagttgttatcgggcyatattgagagcacaaaaatacctctaagcatgaatgctgattgttgagtgtcaaaactcaatgggtgctgcattagacatgactaccttcccaaactcaagaaaattggctctaaaaacagtgtgcagctctagattcaatccttagattagaattccagcatcttctcttgcttaaattggcctttcctgtgtctcagtttccaaacctgtggaatggaaagcatcatctttctgaaggtcttgtactaccttctccgtagtaactgtttatgagcagtgcttttatttaaccaggaaacttttacatagttgtaatctcagtagtagtatgctayaggattatttccaaagtgaaattttaaaatgagcaaacacacagcgtgcagttgccttttttacagtaggttgaattccatggttgtgctaactgaagagaagttggcatcatgagatttgccctcagcaaaggcagcctagaggttatcctagaattgaaacagtgagacaggagccataaagggkttgtctcttaagattctcaggtttcaggaggcacaaaccaggaagaagaaagacatcacaattctctcataatgagaatattcagtaagtaggatatatatatatatacatacacacaatataagtaggagatatatatatgtgtgtgtgtgtgtatatatatatatatatatatatatatatctagcaaaaatggcacattaacctgaaaatccccctacagacatctggaaattctagataaaaatataaatatgtattttaatatgtttatatgtatatcacatgcatatgcaaatatatatattttaaatgtttagcttagcccttaataaagacagctactacagaccagaaataaagtgaggactagagatcctagggagtgtagcgcttgcatgcacccttaggaggctgggcagggggttctgtgtgagtgttgggggagggtgggcagcaccagtctttgtgatcttggatcccgggttttaaagcccactgagggcaggaaataatgtggacacgtacaatgctaagaatttagatgttgactgccacacagaaccaaaacccacaaacagtagaccctcagagaaagggcaaactggggaagtggaggtagggagagggaggagggagaagggagaggagcaccagccagcccagggaattggcaaggaagttacaccattttcacttaggtaggatctgtgggggtaaagcacttcggccaactccagggtcaaagtaaacasctaataaaatcagaaaataattagaactgtgaatcataaagtatcatgatagtgttaaagttgtcacatgcaaataacatggtaccagagaaggaaatacatgtttttaaatgttgttattagaaaagaagaaataccaactaagcatctaattcaagaagayagatgaagaacagagcaaaaccaaagaaaraaaaaraggaaataataaacatgaatagaaatktattaactaaacagcacagaagcaataacaaagtkcaacaaaataaaaagctggttttgtgaaaaggttaataacatggacctctggcaacagatcagaaataaatagagaaaaaccacatatagccaatagcagattttttttgtactgcaatagaataatatgaataacaatatatttgatgaattaggtaattttctagaaaaatatgactttccaaaactgactcaaaaagaaacagaaattctgagtagataataattatcttaaactcgaattctggttaaaaattgacgcatggaaatgtaccagtgtatttataggtactaaatattcaaggaacagataattcaaatgttgtaaatgttaaaaatatataacattttataaatatataaaaatacataaattatatacattttataaaaattattctaagagaacagaaaagaaaacttgttcccccatttcattttaagaggttagtataacctcaatatcaaaaccagacaagactacagtaaaaggtaaaattataggtgccacacatagataggaagagatgaatagaccagtaggtccaagcaggccagatgtaagacaccaaaagcccaacatattaaggaataggataggaaaatgtatgatagtaagatttacgtaaaattatctgtattacaaagggtataataagtgaccagacaaggggggaggtactatggggctattatgcaaagtttaaacacttccagagcaatattttatatactaaaagtatagaaaccrtttctttctttcaatgatgtctctgccgggagccagcatgggagtgcaggtgagctggtgaggaggctactgaggcagggaggaccaccagcccgrcctagaagagggtgctgggcctctccttccacagacctttctctggaaagaggaaactagcagtactgtgtgtccacctggttgggctgccataaccaaatgccacaagccaggaggcttacacaacagacatgtactatcttcctgttctggaggctggaaagtcccaatccgggtctggcaggattcygcttctggtgcaggccctcctcctggctttcatgtggccaccttcttgcggcaacctcacgtgtcagagagagcgcacgctctgtggtgtctcttcttacaaggacacgaatcctattgggtgagggccccaccttaatgacctcatttaaccatcattatctccttggaggcctrtctccaaatacagtcacacttggggtttagggcttcaccatttgagttttgggggtacacaaatattcagtccataacagcctgcttaatggggttctcgtaaagattcagtgagtttccacatgtcaggaggttagagaagttcctgcccattccgaggactcaataatacagctattagtgtaaccgtaggtttccaccaacaaacctaagactgaagaaaaagaccctttttgttccgcacaccaaatctacctacttttactatgaaaacattaatgactattgaaaaaaaaaaaggccaactccactggaaagcaagttccttgaagggaagagatggccttgctcagcagcctctccctccaggcccagggccctgagcaaatgcccagcaaggtgaataaagagagtacctcgccatagtgtcacggagcacaccagagccacctcatgtagcctaaacatttcatctgctttcatgtgcttgtgtttcttcccctgagaggtatagtcccatctgactccttcatttacttcacacatccttgctgaccacccacatgtgatggggagaaagaggtacctggagcccactctcgggtgccttcctttcacaatcccagcactcccagaaagttgtgcacccgtgcacacgttcaatatttgcactggagctcgcttacaggaagagtcctcagtaaattattttgaaaagtagataattgctaaataacaactattactggatttttaaaaataaaggcacatgtattttttgcttaattggaattccaaaggacaccactgtgtctggactcagtggcttaaaaggttaagctgattttgtatgatacagccttttactttaaggaaagatgaggacagcatagtctttggttgaaaagtcaaaagaaaattgtgctgtaaaattactgcagcaaaaaataataattacacactaaagcccactgtgtctgagacatggcacaatttkcagggagccaggtttcattcagagcgacctgggtttagaaaaggaatgaaaatgctatgcagtggtggtcgctgttccttccatcaggcacctggacccgtcacatccagggtagtcactggtgatttttatgacagcaactattccttctgacaaataaccatggaaattttgtttccaataaggtgtggctgaagtgggtggtggtaactaggtttctggtttacccataaatctaagtccgtagatttaaagtaactcaaccatttcaggtctggtaaggttattaaaaaaaaaaatttcttccaaatccttaccaggtttgtggggacacgggtaagctctgaagaggccccacctcattgccatcagccccttggatgggcctgactttagtaatgaaattatggcatctgtccttgaaatgtctggcatgatttgggggttttgacaagaggtcatgttccctcatgggaaaagcactctccttgttccaggctgtttcccattgttaatcctgcacatttgtttacagatagctcctccatttttagcttaaaaacaacaacaacaaaccacccaagaaatcaaaatgacatggtttttaagggcaatagctacctacttaacatgtgtaccgcacatagtgcgtccttcatgcattaagcatgagctaggcggatgcgtgtttgtttacacagacttgctgccgattcattaaggcagagctggggacctgcttccccccattttgccctgaagcgctctgcattaggcggccctaattgctggtgttggagccgccaggagacctttcctgtcgcagcacctggtgcagaagacayagatgctgcacttccctccagcggggtccccggtacatctgmcaggacctgtcattatctaagacttccttgtcaccaccatgcctccccttttagcccacgtgttctgggaagagacccttgtcrgttttcctggcacctgccaccggctgcacacctggcattgaaatggcgctggaacgtgttgtgattattttccctctttaatgaacccacctgagggacatttagtttcttaatccagtcgcctgtttcccaggcattcccatttacaccgtttgtgtggagattcaaaaactctgttgtggtattgagctgttccatctgccagaagtcttataaccaaatctgcaggactcccaaaggagactttttacaccggtaatttaagctaattatttctaaacatatttagtcagttttatgaagacctcattagaatgtgactgtttattaaaaatccaaatgaggtctcacagtcacttaggaaaattattgttgagtcactctgaatagttctgataacagaagataaaatgttttggagctgagagaagtggggaccagagctgtggacctctatcacagtaggggatgggaagaaaccacctacatggattcttggatattttccacccaaggagcctgccctaaaattcctctcacagtacttgtcactaaaagagtcatgaaaggaaaagtttactatgaacactagacgtcagaactaacaactttctaattcacatacaaggaaggtatattaagattccaggtgcccctctcacagccaagaaaaaaacatcttcttttgtgcaacagccaccagacccaggatcaatgaggaagcaagagagaggcaaggttgcccttttataaaaagtgtggaaatactggttaattataagaataaaaatattagtaatcgtttttactacaaaatctcttgagttgttccaagacatcaaactcataagaaagggaagagggaaattgtttttatagacattgctgacagttttccgtcttgagcactcactgttactttcataggtcctttttcataaactgatatttaagattgatcttttgtgacctgtgtaattacagtcttagcctttgaataatttatgctcwttcagcaaacactcctcatctcaatctactgtcatcctttcgcctatcataggatgaagctgacataagccttacctccctcctgcatgttacccctgggcatttaactgctcattggccatctctacctctgtgtcccacaactggcacaaaccaagcaccttagaaactaagcttgtccattcatcttcagactcctggtccccagtacctattcttatcattcaggcttgaaaacaaatttcattttgtactcagcccaatccaatgtcaagccataaaaacaccatgtgaacagcacacctgcctcctgttttcaaggtgcctccagtgcagcttgggaattcacagtctttcatatcagtcccagtagcagcgtccccactggtcaccctggtgttcacactggtcaccccagcatccacagtggtcaccttgtgctgttgtggtctcagaggccaaaatggatgccccattatcaactaagacagaaaggtgaaggaaacagagttacctacaggttgaaggttcagggcctgtcggggcaaatcctctaagttcctatggccaaactccctaccaataggagctacagctctgagtcacaacccagaccactgcaactctgaytggccagaggaccagccttgaaaacactctttcctgataagcagctgtagaycttgagcccatttcggcagctcatagaggctgcatacagactgtctttgtgtcccatagctgaccttttgatgtaaagagccaaatgccattttcttttcatggtaaaaaccccaccccaaagtgaacatgggatgtatggtacatgtatgtttacctattgcacatgtgctcagctccccttataaatatgtatagctttccccccaaacctgctgatatgtatgactctgttgtgtgatacagacctggtgaggcataaaagccaacctgtccttctttctgaagagagagcaccttcagtccatgctggagactcttcccagcttgyaaaccgataacccccataaagctctcctttctactgtccagccatcctggtggtcttttagacaacaccatcttctatccattccatgtgtcagtgctgcattaatttttataaacattggctcctgacacaccactcatctgttcagaatccttcagtgattcctgtcgaatccagaacaaagcccaaacctcaagatccctctattctgtgccttcacagtgtggctctagtctacggcaagcttatttcccagcattctcttacaagtgtttgaagtgccaggcagacaaagtatttgccatttgccacacacgcccagcactgcattccttgtgcttttggtgctgtctggcccatgcacagtggagctctccaggaaaacccctgccagtttggaatgctctaggtctacacagtccctgcagagcctctagtcgcaggggtctactgagtattttcagtgtggttattgtgactgagagattgacttctgaggtttatttcatttgtattaatttaaattgaaatgkccacatgtgactaatggcttttgtctgggacattgcagggacagcacctccttgccttcctccttatgcctgcttaaccagggcccttcatttaatactaattgaaaattccaccctttctaagaaggaaacccgacctgattattcaactggctattttatctccctcatcagcatcctctctgtatgtcacttgccatattctgtcctttagtataagttttagcccttcctcatttatagtaagtcagtcagagaatcagaaggccttggctcttcccatgcccattgcaacatctctgagccccagattcgtcatctgttaagcatagggaatgatgcactaatacccttctgtgtcacgggattactgtaaggattacagaataaattgagcatctgttgtgcctgtttccacttctgcaaactcaccttctcagccattcctgtgcacaaccaccaggctgtgggtccttccaggtaggcccagtagaagcaattggtcaagaacctttccctaaatctggccacagggacggcctctctgttgtcagagatggtggagtttgcaccttgccttgaattccttcaattctgtaggtcatgaattatctgtttctgctggaaatagcagcaattcctaaactagaattgctgtaactttaacacaaaactagaagtcaaagaggagattggcagtgtggcctgtgatgattcccatccagacactgccaggcttcacgccactacccccagcacatcagccaagaaaggaggcactaacgaatactgagctatcagcrgcaggagaaaggccttctacagactcctcaacaccagctcctccaggaaagatggttccctggctkccctggtgaacctggaggttttctctgcctgaaaacctcagttcccctctgtaaaaagttcaaccaaagagctcratttgtcatgttcacaaattagcccaaagataggctttttaatcccttctcagcacaatttaacccaacatttagtgctgtacttactgtatctatgacactaataatccaaagatagttataattcacttgtcctcaaagaatatcacctgtggtcattgagaaccgtatatcaacaatgaactgtgatacatgttcagaatgtgatagtaccaacaaagggactcattctgcctgtggcaatctaggtcttctcggagcacgtggtaaagagctggaccttagtaggaggaaggattttattttgtctttattttagatttagggggcacatgggcaggtttgttaaatgggtatatttagtggtgctgaggttagggcttctaatgatcccatcaaycaaacagtgaacatagtccccagtaggtagtttttaaacmcttkccctccttcctytctcctcccttttayattccccagtgtttattcccatctttgtgccgtgtatacccaacgtttagctcccacttacaagtgagaacatagtatatttggttttgtttctgagttaattcacttaggataatggcctccagctgtacccatgttgtaccaaaggacatgatttcattctttttyttttctttttttttttttggtttgttttttttttktttktttgtttgtttgttttgttttttgagatggagtctcactctgtcacccaggctggagtgcagtggcacgatcttggctcactgcaacctccgcctcctgggttcaagcaattctctgcctcagcctcccaagtagctgggattacaggcacccaccactacgcctggctaactttttgtatttttaatagagatggggtttcaccatcttggccaggctggtcttgaactcctgaccttgtgatccacctgccttggcctcccaaagtgctgggattacaggtgtgagccaccccacccggcccgatttcgttttttatggctatgtagaaaatgtgtatataccayattttctttatccagcctaccattgatggacacctgggttgattccatgtctttgctgaggaagcattttaaatggcaggagtgagacagtaaccacttcagcagcataaggaagggaaagcacaggaaggggaggaaatggcaagatggagaaagagctagtggcctgcctgatgcagctgatgagggaagaactctgaggccgggaagctaactgcaggcttgttgatgaggatttgaaatgtgtttctaggaaggaaggagaggtagcaagtgggcagtgtgtgtgtttgtttgttcactttaatggaaggcattgaggtagtgaatcgtgttctaattggtattgaaaarcaatcttggtgaccattaagaaaaggctgagaaaggctrtggaagagtatggagacacgtttaggaggttagagcaaggctctaggtgaaagatgatgtgggcttgagtttgggcagaggtgttgggagcttatgaggagtatacagtttgggtgttatggtgggtaggtggtgctgataaggaaggaggagaacttgagaatgaaccagggtttctaccactgtgayttgggttgctataaaggatattaaccaagaatgggtatctctttccagcccacccccacacccccaaataaaagtaggtgtaaggagaggcaatgtgtttcatcttggacatgctgagtttaagaagctgaatgagcaataatgtggtgctttccaggaagctcaagagagagatgtgagctgaagacacagaaacaaactatgaaatattagcgtccccctttattcacaagcatctactgtgtgttaggctttggctgcactgaggatatcaagatgaaaagacatggcacaaactatgggacaaaaaggcaaacaaaaaagagtataatgcggctgggcgcagtggctcacacctgtaatcccagcactttgggaggccgaggcaggtggactgcctgaggtcaggagtttgagtccagcctggccaacatggtgaaaccccatctctactaaaaccacaaaaaattagctgggcgtggtggcgggtgcctgtaatcccagctacttgggaggctgaggcaggagaatcgctygaacccaggaggcggaggttgcagtgagcctagatcgcaccattgcactccagcctgggtgacagagtgagattccgtcttaaaaaaaaaaaaaaagtrtaatgcaaagtgataaccactgcaacagaacagagytcttgggagaaagtggaaagagaaaagaggaggactcacaacagaacactggagaatatctgtttctgggggcagtcgggaggaacagctgggatggagtctggaaaaggaaagcaagaggaatagggcgagaacaaagagacccagatcatgagaaygaagagaagacagcatttcaacaggaaggggatagcgaccaggtcacgagctacagaaaggccaggtaaacaggaatcagagagcaaggtagagagaaagaatgtactgagtcaggcatcctgctaaatgtttcacaagccctattgctcttatcacagctaccctgagtacatttaaagattcctatttttaaactaagtaagtaaggcttggtgtggttaaataatttggccaagggcatagagctagaattgaaactttggtctgtccagttccaaagcccatgctctctccccattccacagtgccccccgttagcactggagatgtctttggtacgtaccaagttcccatgggatgatagaaccaggaatccagcagcagtagaacagtggctaagtgtgcagcaaagatgcaaatgtagcttgttcttggagcagcgagtcacaggagagagatgaagcagcacctagaagggaacagggtctagacagtgattataatggttgggagtgtgtttttagtgatagagtagacataagagtaactgggagtctgaaaagaagatgtaattgccttctcaaactaaaggtacaagaaaaggggaaaagtgacagaggaaaatcacagmcaagacagaaggggatgccttcagttcataagcatatgctgcattcacaccactcaatgtgcagtcacagaaagccagggatgctaagacaaattaagtgtgtccctgtacacagggagggggcatcaagcaaagggaygaaattccgtgataaaggtttcacagcatgctgtggaagttcatgaaagaggcacctcatctagctgtggagttgagtggaggttgaagggatttgtcaataaatgcatctcagaacaaggggtgcctggtgctgagtacaggaggtgggagagcaaatgaaaattaattggcaaaggagggagggaaggtgttccaggcagaggcaaccacaggrccctggagggaagctgcagggattcagtatgaaccaggggagatagggaatggggattctagggagaactgaggccttgtcatggatataccacgtcaggaattkggcttcagctcatgaatgacagagagccccaaaggatttgggtgtggaagtgacaaggggaaagggccacactggagatactgcagagacagagtggatcatccaaaggcagaacaatcagcatctgacttaacaaggaaaaggttactggcaaccttttgcctcagtgttttcagactgatggcctatctgagttctttgattacatgcaacagaaatcaactctggctaatttcaggaaaagggaaaagaatattataagctcaaaatgttgatgtgaagagtaaggcttacaaaagataggaaagaaggtaacagctccagagggctagtgagccaaatgggtctcacagccagacagtctagtcaaggcgctgatgctaagacagtgagctctctggtctctttgtcactgtgctcaggattctaataacaaggatagaacctccgactcccaaaggttggttcatgtgctcatccctcgctgtccagggcctctaattgacaagccacccaatagggaagaagtaattccccaaaaggaagtcaaggatccattaggaaggatgaatggatgaaatggatgttgacagaccaaatgatgcattcagtacaaacggcaagcactgaagccagcctgcagccttgaggcaggagtagcaaatgaggatgcatagactgagtgtggacttgacagaagagaggagtgcagctgtaaacagaggagcatttctgatcaaaggatatttataaggtgaaagacccttgacagtagttatgtgttaaggaaaagaatcagaagagagggagagactggacatcttgggaagtggacggagtctttgccagggagccaggagggaagggaccctgagtgcaggtcctccattcaaccttacaagagatgacatcttttcctctgagcctgcagagcagagacaggcgtggacacacttaaataaattgaaccaaacagaaacacactcaggatggcaccctctcctggtaacagtggttttcccagtgtagtaaggaacaaggccatgggctgagaagctggacgaaaagggaagtagctattttagggatgcatcaaggacataggtaaaggtgttcgcctggaatgggagtgacctcttctctggggagaaggtaaggatgggcagatataagtgagactccagttggcggctacaggatgcaggtaggtggaatcccaggacagccaatagcccaaatcctccaggtactagtggcaggggaatgtgactccaaggagaatagggtgttgtgagcrtttctaggtgaactgaaaaccaacccattcttaccccacaccttactttttgcaaccttggaatgaagggaattatccatatgaactctaaaattccatgtttatatgagagatattttcctgtttgctgtttacattttggtgacrggatccatttgaataacaaaagcatctgcactccagatccagtttaatccacatgcttccagagtccttgatgcttcctgtacactctgaataccaccaacagcagaaaacgattgagtgtggattgttaaaggggaaagattcaggacaaaaacatgaggactgtcactcccttgggagagagccctccgctcccatgtcctctgcactgttttcacatgaattgtgtagaggatctggaatggaatgttgccatgtgatyaggtaccagtgagacaaattctgtcagtgatccttctgtattttaatttatgcagaccataaaagatattcagtctgttctctaatttatagaccttcttttgaaaataatctaatctgactacagtaaactaagatttttgaagaaatatatccttttcagaagttctcaaaattacttaaagctatccccccaatttrtcaactgccacaatcagtcgcacccggtgagcacatttccgtgtctttacctagtgatcagcagrgccgcagcgggttcctgcctgcagtagggagggggtccttggagagaatgtggtttctttggaggactctcacratcgtttaatgaagatatctatgcatgccccgttgtgttctgtataattgcaagtgtgactgttacctctggaagatctccttaggcaacgaaatggctattttactcaaagtgtttaatcaatagagaatcatcgtttcacatccgtcaattcaatttggacagcaaatccatttaattaaaggtaaactgtggtttaaaggagatgcaaaaacatatacaattataaaacaacttcatttaaccaggaaacacttaattgactacaaactgggtaatgattttgaaaaatatgagactraaagaaacacatactcgcagaytaaagcaaggagaaaaccatataacttttttctccaatcttattgaaggcttattcagtattttaaatactaagttctgcattttataacttagagtaatgaggtttcttatataaaacttcatatcatatgccaaccccaacctctgtaaactttattctgatagtattcctgcaaatacatacatacacaacatatttacacatgcacatttttgtttaaggctagctattcccccccmcacacacacacacatttgcctgcgtgagtaaccagactagayctcttttacaattttcacattccccatatctgatcagaggttcttcccaaatgtatgcacatgacacgcacacacacacacacacacacacacmtgcatacacttggacatgcacacacacacatccctatctccatttcagaaatgttctttgctttgttgggagcagsaagccactgtttgttctgagtgcagaccatggtctctcttgttctgaattctggtgagttgtcaccatgaatgaatgaatttcctgtggggaagacaggatcatcttcctatctgtttctcacgcctcctgtgtctctgctgttgccagtgttagaaaccttaaccccttggagtctgttcatctctcttgctggttctgctccctggtatgcgtgcagctagtgmctgtgcaggcatcaggtgacctctccgcctactttaggcaaaagccagagaataaaagagaggatccttcaagacatgtacaacccaattatagaggtattacataaggttgtacacgagaaggaacaaaacaccttcagctgccatgttgccttccctgccagaccataggcttctgtgagcagaaccccgaaaggctggacacagagaaagtatgagtgactgtttcaggagaggtggaagaataattacaaaggaacatgtaagctgctgcaaaataactgagtgcatacgargggaatttctgtgtactgccctccttctgttgatttcttctacattggaagaagagacttgaatctgaagccatacaaatatgtataatatattcactaaggatgtgagtgaaggtcactacacctgtttgaaatgacagaaatgtgtctacatttagcctacccaattaatccttttgtattaaatacttggtaattcagcctaatccattatgtccctttaaaaagacaaaaaaagcaaaagtcgttttcactcaaatatcgatgaaatacaaatcaggcttcagagacaattctttatgtgctataagtcatckgacacttttgtgtcagccatctctcatgctgccacagtggcaggatattacaggatcaaagcaaatttgcaggtctgaataacaagtgctgctctgagcacgctctcctggctcctccaggtaactgcgagctgggtgcagatcagctctttcacattgtctagctgagcctatggagacacctgtgcctgggcacctgcctccatggtcacccctgcrgagccctgtcgctagccttcaatggacactcttgctgctttgccataattggcygaccctggaaaatcctcacttacatctgtgcctggacttcttgtctctttgccattttactggcctgggcttggggcctctgttgtgtcactctgtcacctctaactttgtctgccacagtctttggggtacatacaggtggtcacctgcctttgtatctaaaaagtgcttcagagggcagggagcctgcatgtgtagcagatggacaagtgcacctgggaccgatgcatcacagcctgagcggttttacagtgtggttccagcacattcctacctgctcgggtgtgcacagctggagtttcccggcaccatcattggacgcaatatgggacagtctcagagctgcaatagtctgccttccttgttctgctcacgagcccttgaaagtcagtttttctcccgttttgcgcacagcaggtatatcctattcttgaacaatttgctgaaaagcagtaaatgaggtcctttcttgaaggcaggattcttttctcctttctctactttccaaatctactccctgagcccttcctctgccttagaaggcttagggttgtctggccacataaatacatgagtaaccactggggcctctcccaggaggataggaccaaagaaacagaaaaatccagtaactggttttagatagagcctttacacaactgcgttcagactaacaaagtggcaaagacatcagtatctctactttagtttcatgaactaaggaaataaataaggagaaatgtaattcagtaggctacagacaaccagaattcactgcctcagaattttttcactgaaagtgcctgccacatgtctaagaccagagaaagacagcaacttatgcataagctaccactccctgtctgtaggaccaggtttctagcagtgagaaggtggaacgggtctggacacacctctgccgtgaaatctatgcaaaaaaaacccttcatacccgacaagaagatagtgtgtcagttgcttccctatgcctgaattacaggtttgtagagctcaggacaaggaacgtgcatttgggtaacattatttgaaaattgtgggggtgctgctgagttccaaaagtggactggtcaccttggccaatactagctgaggaagcagaggtgagttagccccctggtattgcactggattacttgctaggactttgtataaagaagcacagtctgaaacagacgcactgcaggagaccagggatgaacagtggggaacactgcctgcagaaggggatgtgaaargaagctgggagtagatgtttcaacacccgacactgtttggatttacatcttttagctttagaktgtctactgtaaaatagaagcagaactcttatcacttaaaattgtaagtaaacagatgtctttattctagagtaacatagcacatttgttatctcaccaaaaatagattcttttctgatgttgtagagtagagaatctgaaaccaacagtgtacgtgtaggagcttcaatccattcaactggtggcatcatatacttcacatccttaggactgcttatgtgatgtgcagtcaaggattgggcaggtcatatatcatgtcactccatccttcaatgccttttgatctgtttagcagctccttgtgacaacctaaggaagagggtgagggtggtgagactcagattgacccgtgtcttttgtaaattcttcttcctttcttccttccttcacccctagagccctttrtttcctcaaagagatgaactgggacaggtacgcacttcagactgtctcagaggcatttagccctgattaatgcctctgaaattaaagcttgttatcttcctaatactgatacagaccataaagcattgtgtgttacaataaatggagcacccggagctctatactgagtgctgttcccttctcgatagcagaagtgctgggggatggtgaccaccactaacagttactggacatttcttatgggtaagtcaatgtggtgagtctttagctcatcagagtgattaagaaatagacatgattgttattctattctccagataataaacaaacttaaaagacattaataaattggtccaacttcatacagctagttaatgtgggacccaggatttgaactctggaacccatgctcctgactcctaaggcttccaaagaaccacattctagaatcacataatcagataactgtaggactcagaatacctttaacaatcatatggtcttgtatcctcttttgccagtaaggaaactgagtactagaatggttcagtgacttgcacaagatcacagagctagattggaacacagctaggattagccccaagccctcctgcctgcctgccaggcttctttctgttacagcacactgtgtcatcattaaatgttcatttttaagataggctacaaaaactttatccgaggttcttaaaaataaaatgttatccttctatctagaagaaaagaatatcgtgtgtgtgtttcaagaactttcccaggtcttgactaagtcagagaggtcacatcttggcaacttgggagacacaggagacccagtgcctgagctcaccagctctaggaaccctgatatgtgcctgttatcctgccaccccagtcctgaagctgctgccctcttctcaagcagtgtgaaggatccaagcaagccgctggtgatggggttgccwgacacctagtcctgggtgatccccggccccaactgctcccagctctgccatatccgacctactcacacatcccttgtcgcaattagttcgcaccttgcacttagcagcccatcccagcagggcagctgcctcagctgcagagagccccatggtggtggcagtgattacatacacctacacaaaggaactaggtaccctttaaaaacactgctcctacagaaaacccattcctgtgtcttcctgctcctgttgaatacaaactttccttcccaatacaattccctttatttcaaagtgtagcatcaaagtgcagcaagaagggcctcagaagcagctgacggtcacaaaatagtgactgcttcctgctgctgtcggaggatcgcgccctcccagcccccacctgccagagcctcaagaccactccagctgccctctgccaactccccaagtctagaatatccctctcttccatatccacccatagaaacagcactccatatttctgtctcatttgtaaggtagtttcccttatgaagctttgcatacctttctttggaattagcatacttctgactgccaacagcagttttcatttttaaaattttaatgaacatttacttgtgctgagcatgttctaggtgctttacaaggaaaagaattgagttaatattcataacaactctcttagcccattttacagatgggaaaatggagccaaagtcacacagctaataaatgggacctggctttgaacccagacagtgcggctccagggaatgtgctcttgaccagtcagcttgccccttattctgccttgagttgagtttgttgtttacacatctgtctcttagtgactattagaactatgtctccttgctctctgcatccccagcaatgcccagtccgggctctgcttgtcatgcgctttcagggctgtctgaatgactggcaggacagcctggacaccacagcccggagctaagcacaggatttccctcattgcagccacagtgttggtcccttaggtctcctatctcttaatctctcccagctttacgttatgtgtttgtaaaataaggataatagtacttaccccacaaagttaatgggagcgggcgtataatcagatagcgttaggagttggaatcgttttcaccagcatgtgatctagtctttggcacataaggaaactgagggccagaacggttctgtgactggcacaaagtcgtagatctatactgtgaccctgacacatgtgaagactgacaatgacagaaaatacggatttcttttctcaacagatatatcatgtaccactctaagaaaygtcctctctgatgtacctggyggcatatatatgtattctaataatgtcattgctcaaaagatttctgaagttcttatttcagagtaatctgtagagtagtatgtgacactctctgtttattgcccttgctggtggcaaatctccctcccctggcaggaggacttacatttggggaatagctaaaagtcaagctgaacctcttgaataagatggggaacaagcagtggaaataacatgtctcctgaaagtctggttgtagtttgagtgatgctgctttctgattaagttttcatcaagatgaggtaagagagaaaagtaacaagacagatttctcgtgtggtttgtaggataacacttaaaattccacaaggggaccaggctgcatgtttctttacagctgatgaaaaccagcgttgtgggtacagatgcggccttgtgcttataagtattgtatgcccattaaataacaacattaacgaatagatgcaattggaaaacagacgctttgtgagggtactttaaggcaggaccgtaaaggcatgaaagagggatttacttatgatatgaagttatttcccaaactgaaactatccagacttccagaagctcttgatgtagtgccagttttgaaayaatcttcaaggatgtttcccaaggaaggtcccccttccaaataaagccagtatgaaaggaagaatctaggaaagctatgataagccaggtacttaatcagcaactttatatatactttaaaaaatctcatctaatcttcacaccctccctaagaagttaataataggatctcatattatgcatgagaaaacaggctcggggtggaagtcatggaagtcacctgccgcatgaraagactgaggctcagggggtgtaagtcacttgctgcaacatcacaaggtagatggaaaaaaaatccatgtgcatcttactccatcacactgagaccagagcaatctgtgttctcaggatatttaaatgagtaatattttattcctgtgagacctctaaaccaaaaggtttggggatacaataaatctgttatcttggaaacaaagctggcagctgctcttggctgggctctatgtggtagctgtgcttcatggcagtgyttttgctctcactatccaatatccatccaccctcttctcagcgggcccaaacacaactattaatagaagtatggatactcggtttggatatctctttcaaaacaaagaagagtctcttaaaaactcttgagaaatcaaaacttstaactgccttattctttttcatcccttcttcccctttaaagttgtatttattggatcacattatggtgcccccaacttaagagctaacaagtacatttcttagtccttcttcatcatgggtttcttagcaaaatgagtactcatgcgcatgcacataaacacaccttcagttctgcccagactccttcctgtggatggggagagttgctgacacaggagkcagagtagaaacgcagcagcttgtgctaatggaaaaaggaggatgatggtttcagagcatgcattctgctctcctgcccacccctccacccgtctccagttctgcccccaaaaaggcagctgaagtcatttcaaggcttcctactttgtttctgttccagaggccaagcctcctggtaagactgaggaaagcgtaaagcaccttgagttccatcctcccaaagggccctgtagctggagtcagagcctgcgtttcagcctctccttcaccaccatctaatttattgccttgagcaagccacttgcactccctaggcctgcctgttgcttcttccttccagagcacgaggaaatacaaggaatgaaaaggatcgagaccagcctggcccttgctaggtctcttctgggcaaatcacatgctcttccatccactaagtgaggccacagatgtcagaatgcagccatccagtgtgtccagttcaaagtagaaactgctcgrtggatgggagttgcaatgatcttgaaaatgagtgtttggaaattgactgtctctgagattcctcgcagctatatttgatttgaatccccttccccaaaaccacctattgtgttgggagttaatcaaaccacactgataggcaaatggacatgccaatctctctctccctctctccctctctctcctcttgtcagataaggtttgagggagagaggaatcagcaggggttccccctagctgtccctccaccatcataagccatgcacaattgtcagtactcacctctgccctcctccttctccgggacaccctgcctcctctctccaggcctccatgggctccttggcctctgaattcctgtagacatctagagtccagatcacaaaacaatcacttaatagtcggaattttcatttgttcaatttccatttttggataaactgggcacatggctaaatgttttcatcacattgtatcaattaatccagtggttcccaaatgtatctacacttcagaatggcctggggagaggggggcttcaataaactactgatacctctgtcccaccccagaaattatgatttaattagagtatggcctgggctgtagaatttgttaagacctccctccccccagctaagtgattctaatgtgcaggcaaatttgggaactgctgacttcttagaactctctgccataggacttataatcatgtcctatttacagatgaagctcctgcagttgagcaaactccagtgagcccctcaagctcacgtccacactgcgtgagagccagcactccagcctggcaagactgcagctgtgctgtctcaatccttgctacccacagtgtggtccagagaccacagcatcacctgggagcttgttcaaagcgcacattttcaggccccacaaagtcagacctaccgaatttattcagaatccctccaagggagtctcatgcctgcttcactttgataacggctgctgtagtcatgtcaaatgccctgaaggttacagtcatgtgctggcagcctcgggagccacagctctggcccctagccatcctctgactttaatttacctgagtattatctgggctgctggtttaaaatgacccacctcaaagatcttttttcaggaagttagaaatcctggagttatagcgtttctgtgctgtttcgtgtttgtgagttttaaagccaataaggatcacccctttggagcagggaccacacatctattcctgccgccctctggcagtaatgagcaggtggcagggctcgggactgttagcctgattgatggcctggtggaaccaccaccagggcactaaggtaattagacgatctgtttctggaccttgctttctgggctggaggctgccgccttacgtgattaggatgcgtgggaggcgccgcctctcctagaagctgtgcaggtagcgctgggctgcaggaggcagccaagccaggcgcacgatcagagcagggacgcytcccgttccttggttcctgggctccaacgggcacctccaaaccaatagttccagcatctctgtatgcagaccttagaggacaggaagcgactgcgagccccacactctccagacacggaaactctaaatgcagagagaacgaagcatattttgtcttccttttcctttttttttttaagcaaaataataacttgacacaagtccaagtagttaaaaagatactaaaagaaacccaatttagaagggcttttagtaggctgaaaacagatgtggcaaaccatttcgggatattctgggagatgagatggggaggaccggattcgaaatgcctgggccgcctgttctgggcccgccccgccaggtgcctgtgctcgggaggggccttgcccagcacgcattctagaaggaagcggccccgcgcctcctccctcgcaattaccgccgggtcggaggcatccgggcggtgcgaagtcagcaccgtgccgagcagttgagagcagacggtgttttcttttcattgttccctcgcttcgctgggagagcggcggcacctgttccgcggaagcgcggccaaagttggaagccctggcggctgctgcctgcagccgacgcgcgggggcgcccggcttcatccggccgcgggggaccaggagcctgagagcctggaactgggtgcgggggsacagccagcccgagagggcccagggtcggatttcrgatggaaccagagctcgctccagggagttgaaggagttgggagcgcatctcccaataatcccaaagaaaccgagctttcagtgcatgcaaggggcatttgatttccctcatttctgagcactgaagcastccactgtcatatttttgaaattcgagaacaaggaggttaaagagtctaaatggaagactaggtgaccatccaaaatatcatacatcaattgcatcttgtaattagtaaaatcatttttattacttaaggtaaatcttgataaggtgtttttattaggtaagataaacctggtataacatacgttgcgggtgtgtgtgttttgttcagttgtcattttcagagaaataaatgaatttttaaagtgtatatttattcatcaataattatttttaaagtgtgcctgtataccatatatgtagttttatatctatcccactaccttctgcttgcataactgaagtcacaaaaaggtaaaaactaatcccccaatatacagaagaatctagtatgtcccataaaagcatctttgctaactggcatcgtgaaagtatggtgctggacactcttgaaatgaaatcattgttactgtcaaattagacatctccacaaatatacatgatctgctcaaactgactttacatctgggaaaggagaaattgtaggtctctcttactctgggatatttttgatagagcaaaggtatccatgatgtaaatttctgagatattatakataagccctttataaagtcacaaataatattcccataatgaggggggaaaagattccaaagaaggctgagcacttactgagggcagggaccatcattgtctcctgctttacagtatctgcaactcctagcatatctggtttacgtcttgccaactaaaggtaatgaggcttccctggaagggcactgaatccatggccagaaagtttcacaaggaggcagctgaaataaccagccacatagctcatgggggaacatcagtgcacctcagggggttggcattctgggagaggtcctctcagctcagatttcttttgtaaactttcccagtctgggactttccttcctacactgatcctatgactctgcataaaattcagttttatatgtatacattgcatatttagtgcacacaggacacagcgatcaggtgttgcagggtttgcagaaataagcaaaacaacaccctttatgtgctggccaggaataagtttacagtcaaacagtgcaagaagggcatcataccagggtcagaacaagcatgtttcatcagggcagcaaaaagagctcacatctatggaggagtctttgaaggagtgcagcgtgtgagatgtactttaaagaatgcaaaaaatcttcaactgggaagaaatggatgggaggagaatattctgaacagaaggaatggtgcgagtaggagtttggatcatggggtatgtttggggaacagggcaaacacttgtccttgaacataaaatatatgtgcatagaaaagagagctataaaagataaggctggaaatgctggttggggccatatttaaaaactcgttcttacctgcctggccaaataatttgtatttagtttcagaaagtagttagaaataggagattcttgagcagaacaagtaaatagcactgggattacacattgagagagtttttgtggtattgggacacatagaatgcccatgcaggaagacagtagagcctgaatttaggattgtggcagagggattaagaagttggaaaatacactttgagagctgcttcaaagacactcctagccttggcaaatggttgggtttgcgagaaggaatgggttggttaagggaatcatagcagtcacataggaagtcaggaagagcgcagtgactgtggggcaaagaattctcttttagacttatggtctttgaggtgctggcaggacctccaagggaagatgctcacagaagaagttagaaatcaaattcagaaggttgggcacagcggcccatgcctgtaacctcaacacttttcgaggccaaggcaggaggatcgcttgaggccaggagttcaagacctggcagcatagcaagaccccattgctataaaaaataaaagattagctgggcatggtgacatgtgcttgtagtcctagttacttgggaggctgaggagggaagatcgcttgagcccaaggattcaagattatagtgggctgcgatcacgccactgcactccagcctagatggcagagcaagaccctgtctctaaaaaagaaaacaaaacaaaaacaaataaaaaacattaaattcagcacatggagaaacagggctagagttacagaatagaaattcatccatggaggggcagggacaggaatagatgaaaatgccaggaatcctggggaggcagaagaggccaaggacagagctttgaggtggtcacgtgttcctgcccagcctctggtcctgctctcctctcgttgatgtctagaaaaacattcttaccaaaaaaaaaaaaaaaaatacaatttgctaggagaatttcaaaaatatgacagtggagtgcttcagtgctcagaaatgagggaaatcaaatgccccttgcatgcaaaattcttccacctgagattagttagaggcttcagacaatatggaaagacaatttcagattttaggaagttttgtttattgaatttatttatactaaaatgaatctgtagttctaatttgggaaaatgacttagctacttccttcagaaaaaatataattctaatctttagtgttcaatctgattttctgcccactcctcctaaaaagttttcaatcactttctgaaactagaaataattcaaaagaagagctaaaatattgcaaacttccttcacagtttatttttgcaggccgttctctgagtagagatgcacaggaaatgaatggttacagtaactgggatgtttgtggtaaaaatacaattttttaaacttagaccatttttccaggttttacktctcccataactcaaatattgttttcttctgagaagaataaaaacacmggtgatctacaaaaaatagaccttcctcttgagtayacaattaacttttgtgtgcaaattttrtcctataaatcatagtgtgacccatcatgggaggaactccaaaaaaaccaaactgtaaacccataatttcttttatgttttctaaaggtcaaatgctgcaaatactggccagatgacacagagatatataaagacattaaagttaccctaatagaaacagaactactggcagaatatgtgataagaacatttgctgttgaaaaggtaagttttcatactgcttttaaaagctatggtcagacactagtggtaccatactagcctcattaacttacctaggatactttacacatgctcatatctcaatgcaggtaggctctatctgatggtttctcaagattgcatcttgctctctgattctataacagctcagttccatctttaaaacaaatcattctcatttcataagaatctatattttgcaagtaaaccaaaagttaatgtctatttgtttattttctttccctggttgatattgttctgcccgtctctctttctttgttcacagaacaaagtttgctaaattttgataaatgtccttccagtttggtaaatttccttcatggtgtatgtcgatatgcattttccagtagggagttagtatcagtgttgagacacaggtcctaactcctcctggaatctctcacttccttgtggctttcgaaacctctggtttaatgtggactgatggattttccaggtggaagtgacctacctggaaacctaagtgactgatctccatcagacatgggacactcttgcatgaaccagcgcattcattcatgctcactcccatactggttttccccttttgtagttgctggtgttgggtcggtgaatgttctgctttggttctgccctgcctcatcccatgtgcatggatggggcttcttctctgggatgcactgtagggcataacagggaatttccttattccccctctttctgctgacatagggaggggccggaggtgaagcaaactgcagtccatccagagaagtgtcacaggtaggctctggggaaagtggaggtgatgtggctgaggaacactctgccttccaaagatccacagacttttctatccagagttgattctccataaccgagccctgcacagctgccctggacttagggatcttggtgtgaatttgttagcttctactcatgtaatagtagcaggtcttcttggaagacctgggttataggcagattgctagggaattggattttggccttcctctccactctatattctttttttttttttttttttttttttttttttttttttttttaagacggagtctcgctctgtcgcccaggccggactgcggactgcagtggcgcaatctcggctcactgcaagctccgcttcccgggttcacgccattctcctgcctcagcctcccgagtagctgggactacaggcgcccgccaccgcgcccggctaattttttgtattttttttagtagagacggggtttcaccttgttagccaggatggtctcgatctcctgacctcatgatccacccgcctcggcctcccaaagtgctgggattacaggcgtgagccaccgcgcccggcctccactctatattctcactgcatctaaatgcgctttttagatgaacmagaccagttttaggaaatcaaggaaattgcaacatctgcttattggctaatttagtctgatgttttgaactacctttcctggtttgcagatccaaatttgtcatagaatcacmaagctggaaagactttattttaatctgtttctcatactatttagcattttttttcttagcctgtcttttttaataagcaggcagaaagcttggagacttcmaagaatgaggagttctggttgactcagttcttcaagttctgaacctcacactttgatgtcaattttttccttcttaggcagaattggaaaaaaaaaaaacacatggaggatttttgtatggctgttggcaagagcactcatgaataaccrcattaaaacagcgataaaagaccctcaatatttttttctttaaaaaaaaatccaaaagccatcatttaaacatggagtttttttgaacaatagtcagctctctaataagctgaaaatgcacctctgtagctaaaggaagggtttgtttgtttctttcctctttttttttaacctcttattgtactcccctgaattcccagctgcacagaaatgtgtctgaaatatccagtcattttagtcactagacaaccagtgaagaggtggtggagggaagagaaggaataaggagcttgttaatgcatttggggaaatcaaaatgacacattagtgattttctaaccgggcaattggaatctttaaggaaaacaaatcattagtacttttgtagagcatttcttataggttttaaactttctcattagaaaggaaagaagagaacaggtaagcatgtactttgagatgcctgcaattctgattctattttgagagcatgttgcatcgagggacctaaaggtgaaagtggattagggctctgctctgcaaaacaagcagatgcaatgcactttggaactcatgaattcctgctttgcatctgattgttgtcttttatttcccacatagctgatgattccaagctaaacagattttaaataatacacagtacccagagtgtcagaaggaagacacccctgaagtctccatgcatttaggctgtctggtgaatctatccctgactattctgggagaaacaaagttgacaatggtcactgaattctcgctacccaggagctgcctaggattcagaaagggcatgagaagatgatcctcctgtctccaagacagaacatgtattatacaagacagaacatgactattcatttcacaagtatttcttaagcacccacttcaggccagggactattgtatgacttggatcaaaattaagtgactaactgggtgtggtggctcatgcctgttaatctcagcactttgggagactgaggctaaaggatcgcctgagcccgagagttcaagactgcagtgacccatgattgcgccattgcactgcagcctgggcaacagaatgagaccctgtctcggaaaaaaaaaaaaaaaattaagtgactctcacatttttgtatataacattaatgcttgttatgatgaaaaaccaggaagtaatagtatcaaattgggaggtatttgggctgtgataactgatgacatctatgatgttcttccccaaatgtattacattccaaaacagaaaaaaggagacactgctatgtcaatgaacaagaatgaaaactggatcagaagccgtttcctttgccactcttgtcaatagcaaacatattcaagggtggaggtttaattttgagaaatgttttctacwttccagaaactgatatttaccttgctcagaaaaagagtcttagatcagttaagagctgtagttcagcacttgaggttgctggaactgaaatctaacaaagctagagagagaagcacaccccatgctcccactccccaaaaaccccacaccccaaaaacccaccaggacatggagaaagatatgccccttttttcccctttggaataaagtatttaccgtcaataagctttcccagttcatatatgggaatgcataccaccaaaatgggatcactcctatgtgggtcatcatgcagaaagctgggggagctttctaggggttttgagggtgacacagcctcagctgtatgttttctaagggagaccatggcactggcaaacattcccttggttttagggataaggaatttgggctcctaaccacctaatcatactactctgggatcacagagcctatttagcagacaacaatattgatttgcatttgtgaatccccgactgcttaattccttatagcttaaactctagtaaagaatggcattttcacagagaagtaaagcttcagcatttgtgggttattaaatgaagacatrttaacacatgggtgccaaggaagtcttatctcgaaatctgcagttgtttgcttttctggtctttcaaagcacataaaaattctgaatttcttctttgctcactaagtatgtgtgaacaatgattgatggtgaaagtgatgaggttaatgagtgtttacttttaagatacaataaaaccaaatgcagaaatggttcagaaaatgatcatggaatgagagaaggaagaaagtctaatttgatcctagatgtacatccagcgttgattccggttttgttttcaaaacagtcttttgctttaaaacacagtcttaatatataggcttatacttagaaaacaaaattgacaggtataaattaccttaattattctcaaaacaaaagtaaattaaaaccaagagcaaaccgtaaagtctctttctttctgccttcactacagttgagtggcaggcagctccccttcgatttactgacctagcctagaattccagcaaaaatatctttcgattcccatagtatgtattggcttacatgcctgtttgccacaagcagactgtgacagccactcaaaaacatatttctgtagccctagcacctcccataatgcctggggcagtgtagtcactcagattgctagcaattggatgaatgggtaaaatatttacccacattaaaaagagaaacctaacaaacagagctgtaaatgcaaatgagytctctgacctgtctagttggaaaggtgtcctcattcattcctactgcaagcatcatctgagcatgctcagtgagtgtgcaccactccagtccctgctgtgagaggtaccaggatgccrgaaagccccaacacggagttggtattgagcacacagacatcctttaatttcttcaggcccctcttctgtgcctctttctctacagactctcacctcaccagccaccttgtgatctaagtgagacaaacctttaacatagtctactttttagaaaggaatttcaaacaacccaaccaattcatccatttgctggaattacacctaaaaattagcattttccccaaacatcatccccctttcatacccagacatcttcctaagggtacaatgccttccacattgtgtgtgagatctaaggatggcctctttccccagcagtccactgtttcctggccctagacttgctacctggggactgtttccactcccccagctatccctgcttatttgtggtttgttttcccttgttctcttccttgttctggctaaccaactactgcagagaggtgtgcatgaaatccgagagatcagacagtttcacttcactggctggccggatcatggggtcscctaccatgccaccggcctgctgggattcgtgcggcaagtcaagtccaagagcccgcccagtgcaggcccactggtggtgcactgcaggtaagcagagctccagagcctcttgaaggaaacgcagtgggtgatgggtgcagggccacctttggrgatgatgagtatgttttagaacttcagaggggtgatgattgcacaacattttgggagcactaaatgccactggagtgtaccttttaagaggtttaattttatattatgtaaatttcacctcgataaaaaatttaaaaagcagcagcagcagtgtggtccttcttcctccactgacagascccccttttcattcagtgctggtgcagggaggactggctgtttcatcgtcattgatatcatgttggacatggccgaaagggaaggggtcgtagacatctacaactgcgtcagggagctgcggtcacggagggtgaacatggtgcaaacagaggtactcccgctcatcacctagcctggggccttggtccctgggctccctcctgcatctccccatttcaggrccaagggcacaaggaatccaggcaattatctgttcaagtgatctacctggcattccctgttccytccctccctccctcccttccccctttttgtttttcctctcataaacaaaccaaacaaacccaggagttttccaggtaacagaatcaagagcccaaatttgcacacttttctgtattaagggacccaaaaaagtctctgttaagtgctcagactttcaataccatttccttttattatctcttttaaactagctggtaaccagagcaagaccgctcctgagaatagtggctgaagggttatctctgtgcactttgttcttctcccagggtcctgggaagaacagaagcctcctgaccctaaaaattctgcccagtgtctggcgtcctggggatttgcccattttgtgaagtactgtatactaactagtaactctgtaagtggaaattcaaggtatatcgggaatttccattttttcagaagcaatgttacatcctgctcttaggacattcgtatttttactcatatttgattgttttaagtaggcgtcacaccgaccacctggaaaatgattcatgaagtgaagtgaagaagaagtaagaatcccttacatttagatggtgcatttaagtttatgaaagcctctgggaaacctaatcccatttttttagctaacataaaaataacagaaactttaaatgctgctttcatgggttcttttccttagaaaggggatactgtgtttgaaagataataatcgtaataatttatcttttaatgtactttatagtcaatcaaatgttgccactcgcatttctcacttggatcttccattttcaggtgttgtttactggtagtgtgctgtttttgggaatcaatctgttggacaagaggttgttgaaaaaaaataattaaaggtcatatttatgtatagaaaaaaccgaattaactgtaataagaggctttttaaacttcccatataactaaagattaataataaatatgataagactctaccaatgaattttaagaaaagtcagtgccaaatcagaattagaggccccatatttacactgtgaactcattgaagatatatatgagaacagctctctgtacttctaagaggtttcataatcatattaacttttatgttctgaaataagaacttctaagtamttttatgttttgaattaagaacttccagacttcttgtcttcacagtaatgccaagtttttctggaccttctttgcactattattttgaccagcaaatcctaccatagacaaaattctgctcattcctcatgtgaaatactgagttccaagtgagtaggatcagaatgacagaggtcttcagccacagttttcatggtgctgcagtgcgtgtggtggtttgtattgggtccgattggttttaatcaatctgtgtaatatttggcattgcaccccagtctcctagcacttgagcccttggaccgtgtttctctctggaggaactgtctccactctcttgatgatgtggggctaaaattgataccgtctttcctccttctctggttctctaaagttagtaactcgttccatctccttctccaggagcagtatgtgtttatccacgatgcgatcctggaagcctgtctttgtggggacacctctgtgcctgcttcccaagttaggtctctgtattatgacatgaacaaactggatccacagacraactcaagccagattaaagaggaattccgggtaagtgatgcctaagggaggggcactgcacggtgacttgctcctcaagaaggatttcaaggtcagcacctgagtgagcccttgaatcacaaggttccttggcctccatagcactgttcgtattcagggctgggtaacccagagctctacccaggagacgtctatggtatcaccaccacacaaaaatgtgtgtagacattgccaggtgtccccctgggggacagaaatacctggttgagaaccactggtctaacaaccatttccactccttccctctgaaggcagacatggamtagtccccaacaccatggctccttgtccacagcataaccrtggcacagttacaccatggaagtgtgtgttcagactttccaaccaagagctctccattgtattcctcacatatgcattttgtccagatgtacccgagtcaaggccagactcttcccccacctctgacctcccaaatccccaggtgcctcactccactgggacttgagggctcttaattctagggacccacagtggcccttacgcctctgcctctggcccctgtgtctgatgggcactgtcagtggacgaaatccaaggagcaaaagaaagaaaactcgaactatggtgggttggggagggrgsgggaagggaccgtcttgcagtcagccacaggaagtttgcatctttcsaaaactgcacgtgagaggagtccgctgccaaggcttcttgtcctcatgttcctttcttttctcacgcagacgctaaacatggtgacaccaacgctgcgagtagaggactgcagcatcgcactgttgccccggaaccatgagaaaaaccggtgcatggacatcctgcccccagaccgctgcctgcccttcctcatcaccatcgatggggagagcagcaactacatcaatgctgccctcatggacgtgagtgccccgcttcccgcacgggtccgaggctggggtgtttggggagactgcagaacaggcttgggtcttccccattctgctcaccagcccttttgttttttaagacacaaacttttttttccaacaaaaaatagatttcagattccacgtatgtttttgtgtcggggctgatatccttcgtttctcaaagaccaccaggccaggagtatccgtaaatgcagcatggcacagttgccctctgagagctgagacttttaacctgctggctggggaacaggggacaccatggcaggaaaatgggttaatagrtttgcagcattattttagttcattttcctgtaatttagcctgcagttaacataggggaaagttcaactcattacttcctgccagtctgttttcttattgctattccgttgatgcaaagagtgaatgggtatgttctgtgctaacacggaaattttaattctgttggtgtcatatcataaaaggtacctgaacttttttgaagctcttcagagctgtaaaaaaaaagtacatgtattctttacggcagaaataagaacactgtcacacatacaaattgctagcaaacaagttttagaaaaagcagaacttttaattatgtgtaattttaaaagtaaagttaaattttctccatcaagataattatgtatagattcgatattgcctctctaccagaaatattttaaaaattgataagagatactaattaagttttcttggtatcaaagtaagacttttatcactattattctgcagagaagtttatatttagtctatgttggtgctgacaatggtgacagaattcaacagctgttaaacatgttcagtgttttgtgccacaagcttccttctgcatgaaataacctagcttcttctcttcccattttcctgagtatatttggagcattcttgtttgtgtttgcagagctataaacagccttcagcttttatagtcacccagcatcctttgccaaacacagtgaaagacttttggagactggtcctggattatcactgcacatccgtagttatgctaaatgatgtggatccygcccaggtgagacccggacttcttacagtcagaactagtgccagggggtcaagwttgtttttacactgagtttgtttgcacccgagaagtgcaggccctagtgccagatctcaagtgccagttgaagttgagaactggggatgctgaacacaacggttaaaaatcaggcggaattaggggttagaaagtcagttgaaaccagaaatacaggctgaaatcatagatggttgaggtgacagggcaagacacggccagaagttgagctgttcctaaaagatggaaatactcactggaggttgacaaggtcgcagaccgagttggagctcagcaggaacctgaacatcgcagagccaaagcagaatgagcaaaccagaggacagyggagaagggaagatagcgtttgacccagcccagatcccattcctggagtgactgtgtgcttcctggcacagctcaccgggagcctacaggtagagatcgtcatgcagggcaggtagagattgtcatgcagggtgacagtgtcggggtgacagcagagacaggcaagcaattttaaggcacagcaattagttttctcaatgctttagtaaagatattaaaaagaaataatactgggacttggagataagagaagtttggaatgataaatggggyttttgcatagttactcttaaacattaaagagaaagaattggacagtgatgactcaatgttagtaatggagttagacacattttcttgaagcaggttgtcaggcaagcattagcacagtggtcctttaggagatgaatttattgctttgggatgtgcctataccaatcatagacaaccaccatgacagtaggcattatgggaagtttgaccttagcgtgttttaagaaaaaacttgttctggaaatgaattaatttcctgtccagtagacacaaattctttttcttaaaaaaaaaaaaaaaaaagtctgaagcatttcggcatcccaactggacatgatggcaagatttttccttcctacaatctgttttcttgccatcatccagccataaatggcatggacattcaatycagttctataaggtttttaattatgtctgaggcactgcattatattgtcaaagctcttgcctgaaagctggttaatgaaatagtaatgataatcttkgttcttatccagtccttttggcttaagaagcttaaatattttaaaactcttccccactgatgctctgagaaggttagcttacagtcatttataaagacaagcagacaccacggcttgtgaagcttcaaagacccaactcaaaatagaaccaagggtcctgattttctcacttacagtggcacggccgaaatttcactaattctagagtcttaagttgcagacacttatagaataagggacttcttccttatttagaatcatgatggtttttttcttaatgtgaatcctgaaatgtggagatatttttgttcatattagtgaacaagacatcagtgattctagtgcattctttttgaaaaactgcattggaattctaaagccgcattctaaacccgaactatctggactcaaaccaagccttggctggctcatgggtaggagagacaaaaagactccagttctattcagcagacagagctgattttcagagtgagagaaaagaggctcctgggattcagtcttttagcgaacactaaactgagcatttgaatgtaaaggctttgcaattctacaagaatagcactcaactattttaagtatttataggtccggttcacggrcgtgttatgcaccatttaagccattttctacatggtttacttgggcagagcatagaatgcaatgtgccaagaggcaagtgcaacccacgtcactcatatttctttggtgtaagtggcaagcttttggtcaggagcttgaactgagaaagcaagcagaaagcagagtaagctcaggcagtagaaaaatgggcagaacggttcagatgtacatgttacagcttttattaacatctcggcttcccatcataatgcctattaatttcaacagtgggtacactttgggcatcaaaaagaacataaacatcacatgctattatttgacaaggcagttttataacttgtcaccaggaagtgctggtgaggaaggaaatatttcacggaagcattatttaaaaataaataaatgtaatttttaaaatactgtcagcatagctaacataaaaggcacccttggttaccctactttcattcttacttataaaatcccaaccttaactgttctgtgatggagagagagatactgctgttttgattggcccactgctaactgaaaactatcctgcaatcttgggtataaatcaaccttagcaacctttgacaatgagattttagatcctttggaaaacagaagtcatctagaaattcagccagtggatcctcctttcctgacacatcattctgcataaaattaggtgattgtcttcctctgctcttggcccaggatagaaacaggttgtataataaagtagttctccccttgcctttccataggccacctgtccctcagctaaatcagaaagataaaagttagatgcggccaggcgcagtggctcacaccrgtaatcccagcactttgggaggccgaggcgggtggatcatgaggtcaagagatcgagaccatcctggccaacatggtgaaaccccctctccactaaaaatacaaaaattagccgggcgtggtggcgcatgcctgtagtccctactactcaggaggccraggcaaaagaatcrcttgaacccggggggcggagtttgtggtgagccgagatcacaccactgcactccaacctggcgacagaacgagcttctgcctcaaaaaaaaaaaaaaaaaaaaaaaaaaaaaggtagatgctactcaaaaaaaagttataggaataagaagtcccaaaggaagagtaatttcaaactttaaatgcctgttaaggtttcggggctttgagaagggtttttgaaraaaaaaatcttagcagttcttccttcctgactatttccaagggtaggaattttgtggggtgctggctaataagcaccttcataagccaccatgcccagcaccactcctactgccctgagttgtgcatttacattcatgcaaatgttttagttactcagtatcaacaatacctagagtttgaggctgtaggaaattgcttttttaattaggccacttccaggcagaacagcaaagcatttattcttattacagcagatttgctagatctgagctgcaagggtttggactggaacataaaaatgcaacccaacaatgttatcagttccaaaccttgtcacaaaatagccttattcccaatagtggttataaatccacatgcaatcccagccagcagagcgtggagatctgggcattaagagttgyatagccatcttgagtaccttacatcctggggtggcacctagtgcctctccccggggcctgatgagagttcccttcaccatgcaaaaggggacatggcgactgccatccacatgacctcgttggaaagcagaattactcatggcttaaaaggtgctttctgagaaaatgaaggaaaaagtcccaggaaaaggacaggtggagttgaggaatcagccagcaaggaagtccaaaagcctacattgctgggaggaaaagagaaagaaaagaaaacaaagggagtcagtgaaatcttcagaattcctgaatgatgtctccaaacacagcatcccacatccgtaatcccagcaatttgggaggcygaggcaggaggatcactggagaagagggcttcaagaccagcctgggcaacatagcgagatccctgtgtctccaaaaatacaaaaattagccaggcatggtagyacacacctgtggccccagctacttgagaggtttaggtgcaagggttgcttgagcccaggagctcaaggctgcagtgagccatgatcgcaccactgcactctagctggggagacagagcaagaccctatctcttaaaaaaaaaggattactgagtgtcaatactaaccttatccaaactgttaggagtaaatttcctcttataactaaccttgtgtttatatgttttgaattcagttgtgtccacagtactggccagaaaacggagtacacagacacggccccatccaggtggaatttgtctctgctgacctggaagaggacatcatcagcaggatattccgcatttacaatgccgccagagtaagagacgggcctgtcatgcctgtgattatggtttcatttattttctcactcactgaatacttggagcactcactctatgtcagtcactgttccaggagtttggagtatgtcagtgaaccaaaaaaacatagattcctgaccttatggagcttacattctamtaggagcagtatttagaaagtaatgatacttattaaagcacggcaaggcagattttattcaagaccatcacgataggtgcagggacccctgtcacaggaccttgcagtgggtgagagagagtgggctcaactccgagtgtggcatgggcaggcaggaatttatagccagcaggcagggtgggggtcagtggatggaaaattactaaggggaggcatgaagagtaaggggggttctggctaaactgacttaacaggattctggctgaaggcaggccaggtgaccagacatccgaggaacctgatcagatatcaaacatggtcaggtattaagggtgggtggttcttgcccacggtgacttaacagaaattgctaaaactggattttacaaggaagttcatggataggcctaggagaatattcaggagcctgacgaaagtttggtcaagcaaagaattattgtcagaaatcagacaataaataacagatacaataatagatgtagtaagttaggaagtgacaaattctacaggaaaagaagtactggggttagaaagtgctagggccttacagtggggagcaagctctgttgtaagcatgtgtgccctgtgagccaagacggaggagtccagggagcaccgaggctctctggggaggcagctttccaggcagaaggaagggtcagtgcagaggccccaaggcagggccttgcatgtgagtgccaggacagcaaggaggcggcatggcccaggctcagtgagcagaggcaagagtagctgatggggagtgagcagttcacctggaaggacagtggcttgggggccccggctggaagggcctggcagtcactgtcagcatttggacttttgctttgaaggaaataaggagccattacagagttttgagtgcaaaaatccaatggtgtaatttacattttaaaaggagcactctggcacctgtgttgagaatagactggaggagagaggcatcaggaggctgttgggataataatccccgtgagaaatgacagtgataggagaggagatcatggtgagacgggagagagcaggagtggaggtcatgagaagggggaggttctgatattttctgaaggaagagccagcacaatcctggggaatggagtgggctctcacggttcctgtcctgagagctaggatgatggaatggacactgactgagttgttgtccaggctgcccgtgtaaccggattgtttgtgggtggggggcattgtggagagaggatcagaagctcaaktgtagacatactaggtttgggatgacttttaggcccctaagtgggaatatcaggtgggcctttgaaaatataagggtgaaattcaagagagagggctgaaccagatatatgagtttatgacttattgggatattggtaatatctaaagccgtgagcctgaatgaaatcaaatgagaggcagaggaagaggaagggccccagggattgagcctgggggcttctgtcagcaagaggtctgggagaaggggagactgaggcagagagagagggagggactgctgtgggagaaggaccagccagtgaggaaagcgtgttgacaagaagagagtgtcacccatgtcagatgctgctgaaggccacagaagatacagtccaagtgatttagccgtggccagattaaagctgttttcatgtttctatcataagctaagtaacacttttttgaattctgcaattctatttcactatgactaaggattarttaactattgctatcttagcaagattcaacatcaataagcaaaaccatattatgctcacaggaagcagtgttctctatcttcacactgagctcagagacatttccaggttataaattattcattacctgtaatttacctgtaattgaagttattttaccacttaacatgacaatgtggtcagtgcttatgctgtgttatttttctcttggcttttgcagaatgggaagcattctgcctcactggcctgtcatttgtctggcctgtcatttaaaacccctggttgtttttaactgctcgagattaaaaaccataactcttcaggccagcagaagccacgttggtaatttgtaggcaggactcgcctttaataatgggaagatcaagtaagtggaatcarcccactggaattcagtaaataatgcctgttttctttccactccccgattgttgcctkgttcttygtagccccaagatggatatcggatggtgcagcaattccagttcctgggctggccratgtacagggacacaccagtgtctaagcgctccttcttgaagctcattcgccaggtggacaagtggcaagaggartacaatggcggggaaggccgcacsgttgtgcactgcttgtaagtgcttgacaragctcttcatttcagaacagcgaggccccacactcactctcacctcctagttctctgwcttttgtttcactagaaatggagaagaaataagtaggtctaggtgaaggggtgatcatgacactcagtgagggattggttggcttttcaggaaacaggatatgcacattctgcatttggatggtgtgccgctgccgcacaagcaagcactgaccgtttcattaggacccctgcctccgccgcccactgccaagagrgaaaaaaaaaaaaaacactggctcttgagagccaattgttaagttttcaggaattttctgagctgggtcttcaactgttggtaacttgaattcatccatggtagaaggatttacatcatggaaatcaacaaatgctacaactcagggctccktcccaccagccaaaggccagtttaccaycacattacttgattattcaattggaaatcatgtcaggtctcaaaggacctggagagtgtgtgtgtgtgtgcgtgtgtgcgtgtgtgtgcgcgtgcgcgtgcatgctttttgggagaatgtgtatatkgggagcatttggttacagccartgtccccagaatgaggcttccaggccagcaggttttgcaggtgctaaatatgggcacccctgctacacatagcccgcagccttacctgcacattgagaattatttggggagctttacatgaaaaaaaaaaaagcccacacctaggccacaccccaaccaattaaatcaaaatctctgggagtggggcccagacatgggtgttttttttaaatgcctaggtgatttcaatgtgttgagataataaggttgagagccactgaatggagaatgccatgtttctcaaagcactttcacctgcattttctcattggcagtgatatgtagctaatcaaccagctgcaatcggcttaatagaacaggcaattagaaagtcacggcagataaggaagatgtttagagaatttggggaaatttaaaggataagcgaatgtcacttttcagtgaagtatcattagaagtacacaatgagatctctcttaaattgaaggcaaaataaagtttcactccgggtagatcaagcctagttaaagttgcagacctggctcagggcgtgggttactctccagtcagtgcccttgtctgatgcaatgccacctcctaccccgggcctgcaaagtctccctggaagcccaggactctgcctgcctctcaacgatcaaaacacgatagtgtctcatsctgcaggaaactgatattcctttggaaggagccttaagaacctacccacagttgtcttcaaccagaagttccaatcttttgtcctctaaaaagcagtttattaacctcacctttctctagttgctgtcatcccccctttcttctcatggacccagtgcattaaaaaatctctgttggccaggcgcagtggctcacgcctgtaatcccagcactttgggagaccaaggcaggtggatcacgaggtcaggagatcaagaccctcctggctaacacgttgaaaccccgtctctactaaaaacacaaaaaattagccaggcatggtggtgggcacctgtagtcccagctactcgggagactgaggcaggagaatggcrtgaacccgggaggcggagcttgcagtgagccgagatggcgccactgcactccagcctgggggacagagcgagactccatctcaaagaaaagaaaaaaaaaatctctatcaagaaaatgacaaaaagaattcattagcagtccacatccctatttttatttctcttcaatccagatccaacctctgatcagaacaagaggctcacgctgagatgatacaatcccagcaaagaatattaacattgtagttcgtttgtattagatatatcagatttttctaaaatactaaaaataggttgcagttacccctgcctgcwtctggagacccccagcgtctggagctagatgtataatgcatcgctccccccgggattagcagctttctaaaaagggtcagtgctttaacccacaggactaagttactagtgactcgaagaagttgaggcaccaggacaggcctaacaagaagacataaagacttcttaaatcactgcaccttgtcaacaacacacttcccagaggcagctgtgaccacagaactaaccagtgacattgctgttccatgtaaaacctaaagcaatcagccgttcttcacagtggacggtgggaggcatccgttgtttcttctctcctgcctgtgcagcatctcttcccattttccactgagagaaccttgattattctttggaatactcccccctccctaaagccccgcctctgttcatgtggggctgtctcttgctctcttagcatcaaggtgggcatgagacctaggcctggtgagaatgtttatttttgtttacatttatatatctaaatctaaggctttttttagctataagaaacaaagttagtttacattggcatcccccagtactggccaggaaagaatcaaaccactccagtcttcctcttggaggtaagagcatggcattcagcatagtgtagcgccacctaacggctgtgggtggagagttcccggctgagacaagacctgccggtgctttgaagtgaatggttccttgagccacagatattcaaggtaggcaaatagagagtgtttttctttatatgtgtctcccagctaataaagctagattaaatggatagaattaagatttcaccactttgcaactcttgatgaaaataatagattagacagtggtcttcaacagctgccgaaagtattaggtgcaaagctgataggaaaagcggtgtaatggtaaggcaaggatagaaaacagctaatcttctaattagcagaagagacagtccagggacagatccgtacctcagcgtcatctgacttacaacaaagatgccattgcaacgcagcactgcagtgggtggggaagactgcctggacacgttggtctccctcactccatgtacagaatcccttctagatagatggtagaccaaaaggggaaagtaaaataacaaagcttctagaagaaaacataggagaatatcttcacgaccgcgggtagatttgttaaacaggacacagaacaatagccttaaaagaaatattgacaacgtggactttcattaaaattgagcccttctcttcatcaaaagatggcaataagagggtgaagaagcaaggcagtgggaggagacttttataatacatgtgtctgacaaaggactcggccacaatgtcgaagaactgctgtactgcaagccagtaggaaaatgatagacaactcaatttattaaatgggcaaaaaacttgacaggtacttcactgaagacaaaagatgtcccagcccagcgcagtggctcacgcctataatcccagcactttgggaggctgaggcgggtggatcacgagatcaggagatcgagaccatcctggctaacacggtgaaaccccgtctctactgaaactacaaaaaattagccgggcgcagtggcaggtgcctgtagtcccagctacttgggaggctgaggcaggaaaatgacgtgaacccgggaggcggagcttgcagtgagtcaagatcgtgccactgcactctagcctgggcgacagagcaagactctgtctcaaaaagaaaataataataataataataataataataataataataaagatgtcccgaatagccaatgagcatagaaaagttactcaatattattcatttttaggcaaatccacattgaaaccaggatcacatgccactgtgtactcaccagaatggctgaaattttaaagacagacaaataaatgataatcccaagtgttagtgaagctgtggagtaactggaactcttatacactgtaggaaggaagtaaatactgtacaaccatttggaaactgacagcatttaccaaagctaaacatatacgcagtctgaggctgagctcttctgttcttagagaaatgactgcagaaatgaatcatctaccaaaagataagcttatcacaggtttactcataatatttaaaaactggaaacagcccaaacattcatcagctgttggataaattgtacagtgggtattcattcagtggaattcttcttagcaatataaaacaataaactaccaatataacaccgtgggtgattctcacacagacaacacagagtgaaataagccagtctcagaagaagacatagtgtatggttcatttacacaaagctgaaaaacaggcaaaaacaattgatgatgctaggcttaagaatggattctctttggtgatactgatggtattgttgaggaaggaacgtgagggagcctcttggggactgaacgtggtttgtatcttgatctgaatggtggttacatggtgtatgcattggtaaaaattgactgagctgtctacttacggtctttattgtaggtatattatactttagttaaaaaactgattcagaatttcataatgggctgatcaagctgatatccgaacacgatgatctctcttaaaaccataaaacaagggacarccagatatttttggcttgcttcctaatgaaagtatactttaagtatccttgtataaataaatcaatcttgaattcttaccaagccctggaactacctaccgatttacaggaaatacagagttagaaagcagcatattaaataatatcacagagatgtgatgaatgagaaaaatctaggatgtgggactctctacaggacacagatgaacttgtttcctcaacaaataaattctcaagaaaaaagagagagcaaagaggaactcacagagtaaaataaatttgcaagacataccaaccaaatccaatctgtggactttgcctagatgtggattttttaaaaagcatctgtaagaaacaatctgagagtggattttttaaaaaagcagctgtaagaaacaatctgggaaactggaacactgactagaaatttgataattttaaaacagtaatgttattattttaggtatgatagttatactgtgtactgtgtttaaaaataaaaaggtcccatggccgggcgcggtggctcacacctgtaatcccagcactttgggaggccggggcgggcagatcactaggtcaggagattgagacyatcctggctaacacggtgaaaccccatctctactaaaaaaatacaaaaaaattagccgggcatggtggcaggtgcctgtagtcccagctactcgggaggctgaggcaggagaatggcgtgaacccaggaggcagagcttgcagtgagccaagatcgcgccactgcactccagcctgggtgacagagtgagactccatctcaaaaaaaaaaaaggtcccttatctccttgaggagagagtgactgcagagttgatgcagggatagtgcgggatgagcctggaccattatgtggttkcagagagtaaagaaataaaacaggctggggrcttgtcagaaaagaacaaaagagccagcctgacggagctcccactggccaaagctggaacaatgtgaacaaaatcaatattagtacccttggattttagctgatagaataaaattattatgtataagctcacactgaaataaacaaatcataaaataaataaacaataatagggaagaagagacagctctttcttagtgtagaatgttgaaagagagggaaacaggaaatcaccattaggcaaacaccacagtgataattaattgttgcagacaagatccaccaacggatgctcaaatcagtgggcgagaaacaaaatatttgcgtagtcccaaaatatcttcctcccagatatttattgactgcaaagagaaagatgataactttatggtgagaaaatctggcagacaccatcttaacaagtgagcaagttaacatcaccagtaataagacagatggacatcctgaacccctgggaggagggaacatcccctctctggttttcttaccgaaatgcacggccttgtttccagtcatgagaagacatcagacaaacccaaatgaagggatggtctacatgttatagtttgtgatgacttctcagattgcggctggggacgacagctactttctacttctgtgttctacattctttatattctacaaatcactgatcagtgctcttcaaaagtgtcaaggtcaggaaatacaaggaaagactgaaggaaactaaggagacaggacaactacatgcacgactggatcctggaccagaaaaaggacattcgtggaggaactagtragatgtgactacagtctgtggtttagttaatagtattgtcccagcatcacgttcttggtttgcataatgcgctgtgggcaagtaaggtgttcatatcagggaagttggatatgcattctctatgctatttttacatttctgcacatctaacatgggttcakagtaaaamgttttctttaaaaagagcctctatgttttatagataaataatgaaatgccaatggatttgttgttgttgttgttgttgtttgagagggagtctcgctctgtygcccaggctggagtgcagtagcacaatctcggctcactgcaagctccacctcccgggttcacgccattctcctgcctcagcctcccgagtagctgggactacaagcacccgccaccacgcccggctaattttttttgtattttttagtagcgatggggtttcaccgtgtttagccaggaaggtctcgatctcctgacctcgtgatccacccaccttggcctcccaaagtgctgggattacaggtgtgagtcactgcgcccagctgctaatggatgtttttaaaggccagatacgtctttgaacgtaacccgtacttgtcacagcaattttcctggcagaacctaaataaggttcattgaaaattttctaccatgggcccttatcgatgaattgctgtatcagagaatgtgaccagggctgaggtgagctgggaaaggctctgcagtcaggtgacctgtggccaaacactgcggatggcttgctctgtttgctttaattaaaagaatctgcccaggtaagaggtcccccggcctcagagccctttgttgttactgttccccagggtttagacagcttgtttccacaggtgtttgcragatgcagtgtaaagacagaccgagtgcagtcatctgatctttttcacgacaggaacgggggaggccgcagtgggacgttctgcgccatcagcatcgtatgtgagatgctccggcaccagagaaccgtggatgtctttcacgctgtgaagacactgaggaacaacaagcccaacatggtcgacctcctggtaggacaccccctctgagctgttccatgagacaccccattagcattagaatccactccagctcccagatttgcagggaaactgatgcgtagaggaagagactcattttcaaaatcacaatgtaatcactttgcttgtagggcttttttcttctttcttgttctccctcttcctcwctttgttcttcacacggagactttgtctccagctcattcgaaatgcggaaatagctgaaactcacaagtgaacatccttattaacttcccttcctggcagtgccttccatgtggctaagcacttagtcttcacagagaagaaataatcatagtacgtgaaatgccagattttcaaattatatattttataaatagcttaatcgcctaatatttatcaaagctgtgaattttagtttgacatccagaatattgcatttaattatggtggccatatctgagaaaagtattaaaggagatgagaaacaaaggacaatgtacaattattttcttaagagtattttatgaaatctctttttatgtggagctgttgaaatgccaaccaccgtgactctagaatagtttaaaggaggaagcttttagattaggtttttgcacttctctgtgagtggaggaaggatctgtaggaaacagcaggactaatccaaggttggaaaatggcttgggggcaggagagggaggaagagatggccgatgggacaagcgccaaagccaatgttcccaggtccacagcatcacaacactggggttgatgttaaaaattaaaataaagggacttaagagggagttgagagtcaagctgaatttgaggaastagccatggtcctcatgcagtttaagaagtcataatagcagtgctccaggctggctaatagtagtgaccaatgacaacgagctcccaaacgtgtcccactcatcacgaaccactctccagggcatccactttgcccagatacatgtctcgtgcctgatgagctgctccatttccaagaagcatggctgttggtcagaaaatttgtcacacccacttggttaggcacactctcacccatcagctgttagcatgttggcttctagaaggggcagaaaggactgtgctccccagactcctgcgcccctcctccccaccctacggggagcccatggaaacccaaattctagtctcaactctactactaattctagttaggtgaccccaaacacattagttttgtcatttaagtgtccttaagcatgtcacttaactcccttaggttttagttttgtaaactagggataccatgagctcactgaggtacccagtgtgcagagagatgtgaaagtgttttggaaattgcaaaggggagaggtggttgtagagagtgtaggagtctgccaggcgtgatgccatcagtggcctggcagaagggctctaagtgccctggatgtagtaacggatttcctgtgggttgttgaaaggctggtgtggggcttcactaggaccgtctccctccctgcaatcccacctgaatggtaaagagttctaccgccatggaattcccagtgttccaggatggaggcaattgagcaaagagtggccatgctgtcggcagaggcctgagtttgggctagcagaggatagaaacaaatgcacaaatgaaatattctgcctgtggctttgtgaggtrgttaacctcactaattcagggacaggtatgtagcctcgagactctggttggtacttgggcacagctgaccttgatcaaaaaaaatgtcacttccctctcactgcagcctgaattaagcacatcattagaaacagacccttccaggcctttcctctaatggctccagctgcagctttcatcactcaccaggttttatgggcaggagtgatggggctttttccaaatcagtggtgcaygctgaaggacaggggtgatttttcgtgaaataaatggaggcttagatggccgaaccagaagggagcttgcggtcccagcccacgattctatcgtaacttaggactttttgtattatgtgtgatcctgagggagaagatgggatttctgggtgcccagacctccaaagtcagcagcaggtggaggataaggtcagggtctgagaaatgtaggaaagttttgcaatgtctggagaaaactatgtgacatatctgtcacggggctgttagcagggtattagataatatctggtgacaaagaaaatctcaccatcctcttttcagtgggtttgaagcttccagaactgaataggacctgttgtcatttggttttgcctgtaaatacgacttctgtttagtttggtgttgatacctctgtatgttgtctgagagaattaattagcttaggccagggtgataaagtctggtacagttttattgggcatcacaggccatctgaggcctgagtgtgtcctaagcacagaatgttgtgccagcagctgaaaagagcagtgtactgagtctacttagccgcgtcttcagaggatgacgagcatgtgccagacagccctgggggcacttccgagtgtctgcagaggcaggctagggtgcaatagaggggccctcgccccagccccaccagatcacatgtgtggctgcattccctcatggtcccttccgttcagaacaggcaaatgctaccgctctaccctccctgccagggcgggtgagcacacagagggacgctgtgtctctcaccatctccctttgcagctctgattgttctaaattgcttctgagtgggaagattcgtcggttcgtgttgaagcatgacactctccagggagatccagaaagccctcaagatgtatttctgcaaatttttagctttgggagctctggagaaaagccagtggattgccaggaggcaaaatagtttctaatacaagactagatttttttgtatccagcaggggcagctgcatttttcctgacccctttttcagcccgcttctaagttatccatctcttcaaccagcctcaagtccccatcaaagaactgggtccccagaggatggacaaggacagcacagcctgagattccccacgactcgcctagttatattcagaaggagtgctggcacctgagctcctttgaagagactccggctgcaggaaagcggctgcttcacgctggcagctcccctctcacttttgccttccttaatggcttttgaagttcccagggctctgttttaacatagaaatggtcttcargggcagatcttgcctagagaaacatagtgtcccctgtgaggtggtgggaactttggaagactcccctccacagcctagtgcactgcccaggaagtgaacaactggccccatcatttacccaaatgccttgggcagggctgacaaagctgcctctgcaggtaattacacactttaatatggagtgcagtggcgtgatcatagctcactgcagcctcaaacccctgggctcaagccatcctcccacctcagcctctcaagtagctggaactaaaggggcatgcaaccatgcctggctggttttttatttttatttttatttttttagagatgggagtcttgcagttttgcccaggctggtttcaaactcctggcctcaagcagtcctcctgcctcagcctctcaaaatgctgggattacaggcatgagccacagtgcctggcctggcatcttatcttagtttcatgccattctgcacatatttctcagcctctgttctatgtgcagcatcactgggcattgatgcaagagaagtagaagatacagtctctcccacatggagcttagaactcactggagatgcaaaagtcctacctgaacctcagttttctcatctgtaaagtgggagtaagaatattaagcctggccaaacacggtggctcacgcctgtaatcccagcacttagggaggccgaggtgggcagatcacctgaggtcaggagtttgagaccagcctggccaamcaacatggtgaaaccccttctttactaaaaatataaaaattagccgrgcgtggtggcaggcacctgtaatcccagctacttgggaggctgaggcagaagaatcacttgaactcaggaggcagaggttgcagtgagctgagatcgcaccactgcactctagcctaggtaacagagtgagactccttctcaaaaaaaaaaaaaaaaactattaattcagtcacaaaaggccacatattctatgactcctgtgtctgtgaaatgttcaaaacagacaaattccatgagacagaaagtagagtagtggctgctgagggctgggggagggagatgggggtgactgctgataggcacagggtttctttctgaggtgatgggaatgttttaaacttagattgtatataagtctgtaaatatactgaaaaccactgaactgtgttaaagtacaaaattacaacacatttaatttgaaggtctaattggcttgtattagtgaccctagaatcaggcaacatgtcattctgtaaaatagaacgagtgctccaaggagctgagcagaggaggctgctttataggcagaaaaaagcttgagaaggcagagacagggaacacaacgcagatcggttgtttcaaacttccttccatcatacggttaaaacagaagggacttctttatcatggcagctcaggaaaaccgggtcgcttctgactggttgttgcacttctcctgatgtttggaaagctgccctatttcaaagttcagttggatggcgacgtagcacctagcacgagggactccattctggtttggtctagtctgtcagggcctcatccaaacagtggcctctcatgaactttatgtaacaactgtatcctttaaagaggccaattttatggtatgtgaattatatctcaacaaagctgttgttttttacaaagtaacatcaaaaacaacaaaaaagaatactgttcatagaaggctacggggcttttctgtttatggaacatgtcccaagagttatcttgttatactcagtcaccttcaccaaagccagaagaggtgctgccgctgcaccccctttacagagaagtctagcgtttcgtcattcgtgcaagccaaatccagatccggatccctcctcccagctccaagcctgctgatgttcaaccaccctacaaggagccccccaagctttctcccagcctagaggctggacaccagcggggctctcagggttcatgatgtgtggaaaaggtaagggaaaaaaatcgacaactaaaagccattagacgaaaattccaaatagaatgtagccggataagcagtcccaacccacctgggagtctgaaagggagggccctgtaggaaggtgatggtcataacccttcgctgggttgatttgttactgagttgctgggagaaatccaggataaagggtggtaaagcagtgcatgctcttgcaccgggagaaaaagggcacaggttagtgtaggggacctgrgaacagggcagagctcaatcactgtgtgtgtgagcttcatctcagaccaggtgtaacaggaacagccccgtccaccatcacgtgccttgtaagattcagaaaagagcatctcctcagtggttctcaagcctggttgcccactgaagtcatctgggagctttagaacaattctgatccctgggcccacctggagactgattcgattggtcaggggcctggctgcagcagccgagtgttaaaagcccctggtgagtctcatgtgcagcctagcttaagaaccatgtctgctctagacgcagtatcagcccaggctgcacttgagaatccgcccacccccaactcccgggggagctttcagaaataccagtgcacaggcctgccccagcccacttcagccagaggctctgagatggagcccccrccaggtaggatagacgtgccacacggctgagaaagttggtgtaggaggatcagcgggcctctcccttccctgcagtgccatgcggcggtgttcacagctcgccgccccctccccctccgtcccacttactccagagccaggccccatcctgatctgcggatctgccgcacaggttcaggttgccccctctgtaacttacagccgaccctccagactcagcctcacctcccctttagtaagccaacaatggactcacatacaaaatgcaatgtggtgtggggcctacagctctcccccttgtgccaccaactggtgtgtataggctgtccctcaatagctcttgctgtgaaatttgcagcctatttaacngctgtgcatgtgtgtgtgcatgtgttggggtggtgagtgcaggagttgggtgggaatcagaggtgagctagggtccccaatccacactccaggcaccttgaatccacccatggtcagtcttcctgcactgttgaggaaggtttgtaataatttttgctaataccccatcccctctccccacccccagattccacttgcccatcctgccccctacactcagcaccagccaagcgcctggctcccaggagtttcccagtaagcattttctgagtgactgaaccattcttctctgcagccagacctgagtccaacctgagccaccctttgctgccctctccaacctaggggaggttgtggctgtgctcagcagggcctcaataaggaactgggcatggattttgcagggggctttggtgaagaaagttctacctataggtattaaagatagagattaagggaatgagccactcatcattccagggacatgctgctgtctcgctgagcagggatgagaatttattggtctccttggcacagagtggctggccacaacctggctgggaacactgaactgagggatcccaccacggtaatagggcccacgctgcccttctggcagggcatcactcagaagaatttttccagcccgaaggatctgtccgttcagggtctagccaaaatcatagagcttgccttagtttcaaaagcaaccaggtcagaggtggaggctattctctttgaacctttggaggccgttgatgtggtgtttgaagtgcccacgctggccgccagcctgagttccttagacacaggcagcctgcgcagacgacaaggctcgggcccctgacggaggcccccagtgccgcccgctggtgtgctggcctcgtgacgccctcaccaagctagcagtggcttttaacagccaacctcaatttccagttcccttgcacattttgctttctcccactcataggtacaggaagtctgatcgggagcggggccagcgtcagggaccttggtgaggaatagcagcaggttgccctggttacggtctgacccaaggatgtgaggaggaccgggccaggctcccacctgagcccctactcagggcacctcctcatgcccgaagccagctaatgtcacccaaattggagcactcaggaccaaggcctaaacattcctttttcccctggagcacagggatggctcatgtggcttaattatactgttcaaaagggagtgagctgagagaggaaactgcagcagatagacctatacctggtaatcaaatgtaatcagtttccaatgtaggaagatttcaggcatttacccaggtgcttgggggaggggacacaacaatttgtggtcttccttctctttccccttatttttctgattcagaaaccagtcatcacagaatctatggggactgggtgcttgctcaggaaggataaggtgggagagggagaattcattttgaaaattatagtcatgcctgagacagggcagcttcggtgacttccaagcagcagctccttagcagcgaagcccaaaatccctcctgagtttccggcctgtgttgtggcctgagggcagcagccacatctctccactaggtgcattttaacatgttaaaaggaaatatgttaaaaggatggctctgagtagccactgaaattaattgcacaattaggcttgtataaaatcttttttatgcagtaagggatgggaccgtgtagatttccattacagaaagaattgtccctgtgattcacaaaagcatgatgggagcacttcacagccaagatgtcggcctggtgatctgacaacgtggccttttggaattttgaaattccaattatctcttttaaatattctgaaaataaaagtatcaaatcctgaaataataaatactagaatatgaatcagaaatctaattttgcccagggcaagaaataattttttccagttaaaaagttaaaaaaatacttctacctttattggcattgtgtgtggaaaaagtggtctatttaagggaaatacaggctagtaaaatatttgttatttgcactaggagataatttaaggaacaccttctcaaatgtcatcagacttactttaaaggcaaaccaagtccaaaagttctaaattgagaaagctggaagggaaacttaaatatgatccaaccccctgttttatgaccagaggggaatggattggccaagatgtcggggatggttaataggacctcaggctcctggtcagtgtggggcactcagacccatgagtctagaaagcaaagaacaactggatycatgtttcctatgtcagagtccacccagttgcagttccacctgagtccttcacagacattaaaggtaggattcacatcatggaataagcatttttctactagcgatttktttaataaagctttattggaatataatttgcatgccataacatttccccttttagatggaaataatagacactgggaactccaaaagagcagggaggagagggagggttgaaaaattacctgttgggtataacattcgattgtaatcagtttccagtgttttgcattcctaccagccgtgtaatgcactatgaacattcatttgggggatgaataccctaggagcccaatccccaccattacatgtgtaatacccatgtaataaacaagcacatgtaccccaaataaaaaaaaatccccttttaaagtgtgtcattcactggttttcagtgtattcacagagttatgcaaccatcaccacaaaccaaatgtttaacatttccatcacccacttagccccctcaaagaaatcctagacctactagcagccactccccattacccacttccaggctctggcaaccacccttcagcttccagtctttatagatttgcatgtgctgggtgttttcatagaaaaggagtgtgtgcccttttgaatctgatttctttcactcagcagattcatccatgcttcagttcatccacgttgtaacatggattagtacttcattccttttcatagccaagtaatattccactttatggctatactacattttattgatgtacatttgagttgtttaccctttttggctgttaggaataatgctctgtgaacatttgtttacagagtttttgtgtatacgtatgttttcagtttccttaggtgtacacccagtagtagaattgctaggtcatatgggaattctgtgtttaaccttttgaggagctgccagacggttttccaaagtggctgcaccgtttgacattccctccagccgtgtatgagggttcgctttctccacgccctcgctaacacctgcgattttcttgttatgtgagccttctcgtgaatgttattccactgacattaatctcatggcaccgtcagtgattgaaatgatcttcttgttctctgtcttcgcctctggatcatgaccttcccgaggactgaatgtgtcataaaatccccagtctctagcagtacatgtgtattgagttggatcacatgctgctggacccatggcttgtcatcatgtgtacatgtagccgactttgactctcaactgtgtcagttctgggctagagactgttactttatacaaagagagataaactgtgtcccttgtcctcaaataaatargttggactactagggtatttacaaaacagagtgtaggtgaagaaaaggaaatttcagtgacaaattagsaggcacttaagaaatactggacgttttcaattaatttggcaaaatgaaaagtaatagatacatttccttggttgtggctgtgatgggtagagacagtggtgctgaacctcgctcacacatgtgaaagcttgtctgctccagaagtagaagagagccttccagttgctaaggctctgtccagggccgggctcctgccaggtggcaggcagaggcttcctcaagccctgcgtccctcttctgggttcagagaccactcccaggcttggttctatcagcacactccatgcatacaggtgcagaatgctctccccggccacccgagaccacacctcagccaggaccttgtgcagagcttgcttgggccaaggtacacgatccaggaaagctgagctcaagaaaaatgaatccaatgctggatgtggtgactcgtgcctataatcccagctaattaggaggctgaggtgggaggattgcctgagcccaagagttcgaggctgtgttgagccatgattgcaccaccgcactccagcttgggtgacaaagggccatgtttcttaaaaagaaaaaaaaaaaaaaaaraaaggagggagaaattaatyccctgtctgatgaagaactggtctatgggtcccagaggatctcaaacatttccccttctgtacctttcctcgtcctgttgcctccgcctggaatgcctgttttaattaacgggtgaggatggccacgtactttatccaaactagggcactttgagagtgaaagagggttatgccaggacaacaggcagaagccaggaccrtccagggcaaaccaaggctgcctccactccacgcatcagttccgtcctctggggaaggcgctgtccacttcccactgccatcttccctaagaagacctgccgtcccctgagcatagggaccattccacctcatgtgttgtcattgggttacctgtctcatcctcctcactggatcacggacttctcaaaatcagggaccaggtcaaggggcttggtattcaggaggtgcttatgaaattctcatgagattgaggaattcccacagactgaaagtcaaaggtaaagctggatcatgcatgaggcctcatctaggtaccaagggccttgtgagagatgtcaggaaggcatttcctgaagcactcgttactttctcttctacccctgaccctcctgcacaaagctcagcatgttgatatcctggaaaatacatgtgtggacaaacatatttagagttccaagtgtccagaaccttccgggaattctagccagcacaggtagcaaaataccttccacccagcattgtggggagcatctccaaacagtgaatgtatctggagttcagaaccgtgactttctgattcatttctaattcaaatcctcccagattgatgtcttcccattaagaccctactctatggtaattgctttactaggaacagcgttgagatattcttgagctgacactttcccctcctgttttccaggatcagtacaagttctgctacgaggtggccctggaatacttgaattctggctgatggtgtaaacagctctgcaaacaatccctttcataccacaaagccaagacgttccatggtatttgtgcaaaagagatgaagacttctcaatatgcttattttgctttgcataattggctctttttaagagcccaagaaagtgtttctaaaattgcttgcactgcccaatcccagtaatgctgctgcctgacagaaacacacacacagccacagttgccaaatcccgtactccttgccaccggcttcctagagcagcgtagacagctggtaaactgaagagcacaactatattcttatgaaggaatttgtacctttggggtattattttgtggcccgtgaccctcgttattgttacagctgagtgtatgtttttgttctgtggagaatgctatctggcattatggtaatatattattttaggtaatatttgtactttaacatgttgcataatatatgcttatgtagctttccaggactaacagataaatgtgtaatgaacaaagatatgttgtatgagtcgtcgtttctgtcagatttgtattgtttccaagggaaaagcttgggggaggactcagttcacaaaatgcaaaactcaacgatcagattcacggacccagagcttttccatgtgtttatattgtaaatatttttgatttcatcaaattatttattcattaaaagaaatttttgtgaagcacagtgagtgacaatcatttttcttaaggcctggaaacgattttctgtatgatgttactttatgtgaattctcatctcaataaatgatgacccgtgagcagccgtggcatgttcctggtgtcccagtgcacaggcggtggaggccgcacccgacacgccagcacacagggggagagagtgcggccggggcctgtttgccggagcaagtagagtagagtttttttgagagagagtgttcgtcagtgagagcactgagcccttcacggtggcctgccctggtgccggggaggctcagccatgagcctgcaccatggggcgtgagccctgaccttgtggggcagccaggccaggggccatggcagagacttgctaactggagcatcgtcttcctttctctgtttcccctcagtctgcgggggataatatctctcttctctatgcctcaggccaacctaagacttgctgagagaacagtttttaaagggttagagaatcagagtgcattgaaggacaccgagctgaacaagttcccaccagagcacctgctctgcgccaccctgggctctggccgctgacacagaaggcaggtgcacggtggccttgcagcttgcatttagcttgggttttaggctgtgttaacgattgccaagagctgacagaggcaaagctctgtcgaacacctcttgtgaaccagataccatgcagagcatcttcctgtgtggtagcacgtgctccccaaacatgagccaggtacaactgcgaaacccacctgacagatgaagaaactcaagctagaaaagattaaataacccgtccaaagtcacactggctagcaagtgccagaagcctccagagcccatgggaggtggaagggcagcaccctcaccatggcagaggagcagagtctgctagtgccgagacagagactggcccgccacccgctgtgggaagtggagaggcttgagggcactgttcctgcctgctctggggatcttggtgaccaaagacttcaagggcagaggttgccctccaagaggactgacctggacatctgcgtgttagacctttactgcttcgctgtaccctgagcaatctatatgccccgattggtgtaagtttctctagacccctccttaaactgggtgggtgggaccctgtcctcccccaggaagagctggctgcagcggagcttcgagtctgtactcaatgcctcacattcagactcctcctggaggatggcccctcgccatcccacccagttctctttgctaagctcctaagagactagcaggctgctatttttgtctgtccctcttccaaatgatttctccaggatataggaatagggatgaagacatatggaccgctgcaccctttgcgggtgagctgggccctgaccaggggagtgtggtgaagcccttggccctccgtgatcatggcggcgtggctctgggctccagtccgtcagcatgggtgaaaagacggctcatctgagcatggcgaggaagtgacctcagatgtgtgagtctaatgacaccgccacttcccagtcattccctgcgtcgtcataccccrgtctcacatgggagccagttgttttcaatctcttggatttttatctttctttcacttatttcaccttttagcggaaacagtgatagaaaaaaaaaggcacaggcattttgtggctttttcagatttcccacgaggcctcacagcatggttgagacctgttatttccagtacacagagaaagtctctgcccctcgcaagcaagagaagccaccctcttggctgagagtccttctctgtcttctcgcagtgctctgggttcccctctgttgtggcatccggaaccccccagacacttcaaagcctgtgactgctctggaagctgatggtcctgcccccgactccctggcacggtccccctctaagtcagcttcacagcagcacctcatgatgcttttgtaacgtgtcagcacagcaagactgaggtgtgtttccagaattccattctctgtatatttctagatggggtgcgctgcaggggtcatttggtgtaagacgtagaggcagaagggaaacagcagccacattgtttttacactcagaaagtggagcagctgtgggccccgcaggtgaataacaatggtgtgagctcctccacctctctcctaagggccctcctagcctctgctcactgggtcaaaactcatgcctgcatttttaggttttgttaaggtatcctagtgccaggactaaaacgtgcattagttaccttctgctgaataacaaattgtccccaaagttggaaacttaacaatgaacatttattatctcataccatttctgtgggtcagaagttcagaaatgatttagttggatgattctggctcaaagatcgctcgtgaggtggccatcaaaatgggtcagggccgcagtcatctgagagcttgactggagctggaaataaacttctaaggtagctcagtcacaggcctggcaaagtgcaactggctgttgatgggaggccccagtttccccccatgtgggcctttccacagctgcttaactgtccccacagcatggcactggcttcttccagggattcagaatggaacaaggcagaagccacaatttcttgtatgatctggccttggaaatcatatactgtcattgccacaatatcctatagtttcaaaagtcagtcctattcactatgtgaggggactgcacaaataccagggcgtggggatcattggagccatctgggaggttggccaccacctgctggccagctgcagacctcccacatcagccagcacctcagcatctgcaggctggttggctggagcttagcaaatctcatccctggaacatgtggcttgccagtcaaggctcctcccatataccatcccctctgtcctactatgcgttttcatcctaacaccttctactgcgacagtgctccaagtcgtttgtagtatgccctaaggaaacattattccattgtaaataaacttgattaacacaggcttgattaacgaggctgtctttccccgaactccacggaaatgctccctctgaaactttctcaaatagaggtaagtcattctttcatgtctcaaagatttaatcaatttcaacaaccaccctcatactccacttgagctgatggtcacaccctgcagcctgtcaccttgaactgcctgacctctgaaatcttgaataaacatgccacattctgactccagcctcttcaactgctagctttatctttgccttattcttttattcttgttctttgtatttatgaaaaccttcagcccaatcctgagtgctgcaccctttcttaccttttccacagaacaacccaagccccatgatgtatcacttcaaccagttttgctaacaccctctcaatgcccttgacacttcatacttccatcatatccactctacaaatggttaattttagagaaactcttccaggacttttgatctcagacaaactagggtaacaaaaaccaatctaccctcctaagtgtaagaaataactgggaaatatatatatttttaaaaatggtgtgcaagatactggacatcaggcaatgaaggataacaatctccaagaaacaggaaacaaattaggtgacccctaggattgcccyagcttatggcctgagagaacttctagaacatgggtgcagggaggggggatccaggtggagccacatggtttctcttatttgaggagataaggctgaaagtcaaaaaggccaaagtggcaaagatctgcagggcagagtatgagacatagagctacgtagagaaagagttctgaagatctcagaatgtccccctcaagtctttagctaagtactgatcacaacaaccttgtaaggacattacaaagaaaaaaaaaaacctgaaaagattagaaggaacaatactcagagttcacacaggccagaatagttcctgtttccattgaatagagcactcatgtttttgactctgtagtggggcaaaactatctctggtctaagcacagctgtgggcctgcctaacaaagcaataactgaggcatccaactgtttccaagtaacttaattgcacctcagaacaaaactcaagaacatttacaggaatacaaaaatatccagcacccaagaaagtaaaattcacaatgtctggcgtccaatccaaacttactaggcacacaaagaatcaggaaaacatgacatatgatgagaaaaccaaccaatgaaactgactcagaaataataccaatgaattagtagacaagcacattaaagcagttgtttcataactgtactccagattctcaaaaagaggaaagatttagcatgtatggcaaagacatggaaaatattttttaacaacccaaattgaacttcaagagatgaaaactacaaagcctgagacaaaaaatatatatatattaaatgtggtaaacagcagattaggcgccaaagaagaaaaaatgagcaaacttgaagacatcagtaaaaacaatctaaaaacacggaaagacaatattggcaaaaataaaacaatgaagagagcatgaatgaaccattggagtcgcagtaaagttagggagaaggggcagaaaaaaataattagtgaaataatggcccaaattttcaaaactgggtggaaattataaacccacatatccaataagctcagaaaaccctcaagaacaagaaacatgaagaaaactatactaaggtacatcataatcaaattgcttataaccaatgacaaggagaaaatcttataagcagccagagaggactcactgtgtgcagagaaaggtaagaatgacagcagacttcctttcaaacacattgaaagtcagaagatagtagaacagcaatttaaagttctgaatgaatttttttaatatcaaccaaaaattctgtacccagaaacaatattttccaaagtaaaagtaaaataaagaaaatttccaacaaagaaaagttgaaagaattcatccccaaaaggcccatgatacaagaaataaagggaatgatctcaaatagaaatctgcatctatgcaaaggaatgaagagcactggaaagagtaattaaatggagaaatataaaatacttttttcttcccacctcccagcacagcaggcattctcaggatacactaaggctgaggaaaagggaggtggcaaagggtcaaggtcatggtccctctcatccaagtgcccggccagatgggagggagtcgtaatgtctggtagccaccatgccgggtcagactccactgggatgagcccctgctcctcagcctctttggtgactttagcctccttgtccttatcgtcttccccattgccgccgctgtggcagcttcggcagtagtgctgctgtccagtggggcggcccaggccaccagcttggatagccttggggcccagtgtggcctgtgttggtggtgcccactgtgtcaggcagtggcagggtgctgtccatagtcctgtcccggctcagctgcatgcccaggccccagtgctggtataggaggcagcagctgtagcctaggcagcagcaggaagcaacctctgcttgcccctcccctctccaacaggctcatcaactcatataaggacaacagcaatgatttcatatgccccatctgctttgatatgattgaagaggcatacacgacaaaataaggccacagcttttgctataagtagattcactagagttcggaggacaataatatatgtaccaagtataactatgttgtggacaatactaaccatctgtttcctaatttgttggtgaatgagctcattctcaaacagaagcaaagatttgaggaagaggttcaaattggaccactcagtgagtagcaccaatggccacaggtggtgaatatttcaagatttgttgggaactgaccaagataaccttgatttggccaatatcaacctcatgttggagttactagttcagaagaagaaacaactggaagcagaatcacatgcagcccaactacagaatcttatacaattcctcaaggttgcaagaagaaataggag

SEQ ID NO: 95739 - DNA, 13186 bp, Homo sapiens
tcacgccaggagctaagctcagaccatgagtctgcaagaggagaagggcatttcagggggatcagctcaggcacacagagtccagctccaactaaaaaacaccatggatgggccgggcactgtggctcacgcctgtaatcccagcacttttggaggccgaggtgtgcggatcacttgaggttaggagtccgagcctggccaacatggtgaaacccatctctactaaaaatacaaaaaatcacctggatgtggtggtgagtgactgtaatcctagctactcgggaggctgaagcaggaaaatcacttgaacccgggaggcggaggttgtagtgagccgagatcatgccactgcactccagcctggatgacagagtgagactctgtctcaaaagaaaaacaaacaaacaaacaaacaaaccacaacaaaaaaacccgtggatggacaaactattaagtgggtgaaaatagtgatgaaagtgaccccctttttctgcataatttaataggatgtacaattttaggactagattgtgccttctgatttttaatcaatgggtcaatgtggaaaaaatttaatctgtttacaagatgattgagtgatcaattgatttttactgaattaacttaattaaccagctgttaggccttatatatgtaatctctaaatttacaaaataagccttataaaacaaaattagccaatttcactactgaataatcactgaaatcaccctgaaagacagacatgtgtacttatgaagcgtgacaatgtgtcattcaaggaaagtggtttttgaaaattcgtatttaatgcctttttaaaattacaactctattagggatagaaataaaataagtacatgcctcttttgttcctattgattagactaatttaatctgatcaattttaaaccggggggggggggtgctattttagtaaaatgaaagtgaagatgacctgtctgtgtaagtccaagaagaattgcaatgttgcatttcaaatgtagtgtatcaaaaaattacgcatttgaaaccagactgaaggcttattatcataaagataattaagcatgcttcggtggcttttgcaggcaactgaaatgtcttttgggtactgcctatttacattcattcctaaacggtatccaccgccattcatatcttgctgtgggaacacccagctgtctaacttgtagtttcttaattgaggtcaattctcttactttgctcaggacaggtaaatctacctccaagaaattgcaatggtcaaaggcagtgtgaactcataaaaatcaccattccctgacactttttaatgtgataatacaattgtctgcccaaaactgagatgcttttttaaatagaagagaacaaatatgtgtttagaatgaacatctcttttctattcctatttttacctctttagaagaattttgcatataaataattttgttttttagtttatttctagaaataaccatatctacttgtaaatcattatttgggccctgttgggttttttaagcaactaatattatactgttataaatatattgtaatatataaactaattatatcgttataaattattagttattaatgtcaactaaagtttttccatgtattgattcctttcaaagttatatttaggattacgaagttctatagacattgagttttatataaaggtaacagaaaaaaatgtagaaatatcataaaaataatgtaacagccctttgggattataactgatttatgctcatattatcaaaattggaagtttggtagagaggatttaaagccaggagaactggtttctggctccaggactcattgtaatgagctgcaagtcattggcaaaatgtcttcaggtctccttatgttcctcaaaccaaaccaaatctcacctaatctttgtggataatgactgtgccatgagccacactgctcagttgtggggatcaaaacagaatttctgaaagtttttttttttaagccttgatttaagaagtgactgatggaagaggccccaagtttttgtttgttgatttgtttccttgtgtgtttttaagcaggaacttaaagaggatgaaaagctgtagatacaagtggttctgagaaggcaaagctctgcattaccctttgtcttttattttgaaaaacagatgaaaaagaaggttaggaaaaattcacagcaagttaccaaaaaatataaattggccaggtgcagcagcttatagccgtaatcccaacactttgagaggctgaggtgggaggatcacttgagcccaggagtttgagaccaggttgggcaacrtaatgggatcccatatctacaaaaaataaaaaattagccaggcatggtggtgtgcgcatgcagtcccagctacttgaggggctgaggtgggaagatcgctgcagccagggaggtcaaggctgtagtaacccatgaatgcgctactgcactccaacctggggaacggagtaagaccctgcatcaaaaaaaaaaaaaaaaaaaaagagagagagagagaataaatgactatgcagattgccttaaacttaggaacatatcagatgtcccactacaaaaaagaaggtatttttcaagtgatataaataaggaactaatgcagaaattcaattttccatgtcatactaaatgtgaagtgttttagaaagtgtgagataatacataagtgcaagctgttatcgcatttttttaaaagctagaaaataagaattgtcaagtgacagtgacatatgttaatgcagaaagtcatctacttttcagatgatcttgataatctctactggtgaagtgcagcatacagatatcagtaaatgtcgctgctatttgaggagcatcgttactctccaagcccctcacaacaggtgaacaactggtctccaacactgccctctccaggttgggcaggatggacatgagggcaagtgcaatttgtctaaggatgtccagaacaagctttgtgagtgcacacgtcccaaaccgtagcacaaacctgacagcaagttagaataggctctgttacagaggatgtgagggacgttccctaagtgtggcacatgaagaaaacccacacatatgagaacctactttatgcaaggagcaggcctatctataatagttgatggatatggggcaagaatacaaatgtagattcatatactatatatctagatatttgaaagttatggccacgcacagcggctcacacctgtaatctcaacactttgagaggccaaggcaggtgattgcttcagcccaggagttcaagaccagcttgggcaacatggtgaaccctgtctctacaaaaattagcctggcgtggtggtgcatgcctgtagtcccagctactcaggaagctgaggtgggaggattgattgagcctggaaggtcaaggctgcaatgaggcaagatcacaccactgcactccaagctgggccacagggtgacaccctgtcggaaggaaggaaggaagggagggagagagggagggaggaaggaaggaaggaaggaaagaaggaaggaaggaatgaaggaaggaaggaaggaaggaaggaaagaaaaggaagcaaggaaagaaggaaggagaaaagaaagaaaagaaaagaaaagttacaaagcaagctaatggctggaaaataaaatacaacctatcccccttcctaataatctggaaggccagtctcacatgtagaatgttcagcctccttggaattctgcaccagaacatggcgattggccatctactttctctttccatcctcagcttcactgtgcacccaaaagggcccagtgggtgcctggtcttgatgctccaacttgcacatcgagcctctcctcactgtttccaatagctgttgcttggctgccccgcccagctaaagagtgcatgaaccagggatgccattcaccctgatctggaggagaggctggtgcaggccttagatgtgggctcaaggaatgtttgggtggagagttccagggaccccagtgttcacagcatggcttggaagagggacacatgggttccagtgggcacttccccttgaccccatgactccactccctgtaagggtcatggctggaggagggctgaagtaggggactctcaagcaccagatggaaaggaagccccattgcctgggtccaagggcgatgctggcagggaccgccaagataaagttgtaataaggtgagtcagttcatcacaatacttttgacccacaggtggtttctgtttcttccaggtaatacaagacattttaattatctgctcagaactgtatccttaatattccagagtgatccataataaaacagtaagcaaaggaatttgtcttctagaccatgggtagccaagtggcaagaagacttccatttagtgaaggtaggcactacatttaatatgcactgggctcatcctcttgtcttccttccctttcagaacaataacgttccaacagcatcaggtagacccaagcaaagtaggggtctgcctggatggcgaggggtggaaaggagccctgcagagagtgaggaggtccccacagggggctggcctggcacggggatcagaccaacctgtgtagggtgagcaggccctccctggtggggtaaggagggtgtttgcagagagaggtgggcagggcagttgtagtgatggaagacttggtatagcttggagactgaccaaataagccaatatgctgaggataatgggaggcagatttctcactgtgggacaagcgggaagggagaaaaccagcgtgaacgctgttgtttgattggaactggagatatcaaggttttcagtacagagagatagacatagaaatagatacaggtgtgtgtgcgtgtgtgtgtgtgtgtgtgtgtggttctgtgcactgacaggcctgggaatatcaagcagcagatagcaatgagcacatgcagtgcaaacagcttagtttctaaacagcattttccactaagatgaaccagggcaccttgagaagtggctgattctgggacgggggcaaggaatgctcaaaatgagcctggagtctctcctcgtgccagtaagtgaggcagtgctccaggaacaagaggacctagcaaagggacacagaaccagcttaaaggggccccccaccagacctgggacatttttgagcttacaaatagataatgatagcaatagatacaacccattgagtgacattacaacccacaggaccatgttgatataaataagaaaggaaataggtaacttgaaagtttcatgaggaacaggatatttataaaggatcagagaatctctccccaaaatatttgtcacttactaagggaaagaaggggtagctttagggaggggaagctgggagacaccaccttaatcaggagtgctgtttgcatcattaccactaatgaggcaaatggaaacgtgccacatgcaaggactcagtgagaacacaacactcgtgatattcctgcaaaggggcatcatctgagttttaccacgagaaacatcagacccacccaaatccggggactttctaccaaataactagcctgttatctccaaaagtcagggtcactgtaatcccagcactttgggaggccgaggcgcgcagatcacctgagttcaggagtttgagaccagcctggccaacatggtgaaaccccgtctctactaaaaatacaaaaagtagctggccgtggtggcaagtgcatgtaatcccagctactcaggaggctgaggcaggagaatcatttgaacctgataggtggaggttgcagtgagccgagatcgtgtcactgcactccagcctgggcgacagagtgagactccatctcaaaaaaaaaaaaaaaaaaaaaaaaagtcagggtaatgaaagtcaaggaaacactaaaattattcaggactgaagaagaccgaagagatggacaactaaggcaaattgcaggcaggggtctgtaaaacaacgcagccatgacagccacatcatgctcaacaatggcaccaagacggacatgctagggctaggcacctggaagtcccctccaggccaggtggccgaggctgtgaaggtagcaatcaacactgtataccgccacatcgactgcagccacgtgcaccagaacaaggaccaggagcagctcaaggagcaggtggtgaggcgygagtggctcttcatcatcagcaagccatggggcatrtgccacaggaagtgcctggtgagaggatcctgccgaaaggtgctcagtggcctggagctggactacctggacctccaccttattcactggccaacaggctgtcatcctgggaaggaattttcctttttagatgaatcaggcaactcattcaggggctggtgaaagctgctggcatctccaacttcaccatctccaggccgagaggaccttaaacaaatctggcttaaagtgaaagctggctgggtatggtggctcacgcctgtaatcccagcactatgggaggccgaggcaggcggatcaggaggtcaagagatcaagaccatcctggctaacatggtgaaaccctgtctctactgtaaatacaaaaaaattagccgggtgtggcggcgtgtgcctgtagtcccagctacttgggagactgaggcaggaaaatcgcttgaacccaggagatggaggttgcagtgagccaagatcrtgccactgcactccagcctgggcaacagagtgagactcygtctcaawgggaaaaaaaaaagtgtaagccagcagtggttcatcagattgagcgccactggtaggtccctaactcaagagaacttaatccagtactaccagtccaaggcagcatagtgaccgcctacagcccccttggctctcccgacaggcccagggccaagcctgaggacccttccctcctggaagaccccaggatcaaagtgattgcagccaagcacaatgaaactgtagccaggttctgatgtggctcctcacacagaggaacttggtggtgacccccacatctgtgacactggatcgcattgctgagaacttcaaggtctttgactttgaactgagcagccaggatatgacctccttactcagctgcaacaggaactgaagggtctgtgccttggtaagctgarccgcccccaaggatcacccattccatgaagagtttcgaagctgtggatgtctgctcttccgcaagtaacctacacctggttttcccgcctcattgttttcttgcaaatgtagtatggcctgtatcccttggcagtggggcagcaatctgcagactgaccagcaagggtctgtcaagcttgacgtcaggtctgaagagcagcatcagtagagtggaattcttttcccactttctttgccatttttgttcagctgaaggaagtgcaacctgaatacccttttctgaccaaagagaagcaaaatctacagagtcaaaatagtgcctctaacagttgagtttcggctgatggaactgtaatccttacggcaagacttctctttgcctcaaataataagtgcttttgtgaaaagagacagaggggggcaacagaaggcaatataagactttggattgaatcattttgctgcatagaacactcaggataattggcaaaatgtaaagggggtttgaggatgagatggaggtgatgtgtcttttaatttcctggttggaatggtgtagtgtggttacgtaggagatagccttgtagcaaatacatccgaaaaattggggcgagttgggatatgacatggacaaattacttgcaaatggcttaggaaaaaatcgttgtgtagtgtactcacaactctaagtttaaaagttcctttaagcttgaaaatttcacatttttaacaaaataaaagaaatgcgttagccacagaaacatggcacacttagaataataggataaataagcaggtcatagtgatctatgacagtcaaaaggtaatctttcctgatgcattggctggcatcattaagagaatgtttccctttgggaaatggtattaggacagttaatattttacctagtttatttcttttttttttttttaaatatatagacagagtctcactctgtggcccaggctggagtgcagtggtgtgaacacagctcactgcaacttcgaactcctgggctcaaggaatcctcctgcctcaaccccctagtagctgggactataggtgtgcaccaccatacctggctaatttttcaaatttttttgtggagataggggtctccctatattggcaagactggtctcaaactcctagactcaagggatcctcctaccttggcctcccaaagtgctgggattataggtgtgagccaccatgccgagcctaacatagtttcaaataggaattataatagcagggggtattgctatttttcttatgatttggaataacacaaggcagaagtaaaataataagtaaaacaacatggacagagaaaaataataatcagttgtttttcataggaataaaaccatctagaaaggcacgtgaagtatgtggaatggaggccaaatgtgcaatattgatggagggggaatctaatgcatcgggaaagggaaagccatcagcatggatgagcagaaatgaaaacagctatttcagtgcactcaggaaagactatgtaggtcagccagagttaggagtggtggggagtggaggcggtgagtggagcccggcagaaccgggctgtggtttgcattcttgggaccacagaagtgaggtaagccaggagcagacacaactggagtccgaccaacaaaacacagtgagtcagagtctaatccaaacctgttccatccctggttgccaggcaaagggaccctctcattaagttcatggactataatgaggtgaaccgccagaaattaaaggaaacggtaattaccgacagggccatgcaaggtctgggaggagttaggtggtcatctgcccctcagacgaaggaggaacggggaaggctttgacttactgaacccgtgtactcaagagagctgctatgttctgctgtctgcccctggtagaccctgatgagcctcagggttgcaaatgcctatggtcccacctgttctaatcccagcctccctgtctggaaggaagatagtctgggataaggctgaaaagcacattcctggagcccaggtataggtgtcctgggctcctgggggccaggtgaaggtgtcttggttctgcaccatgtaggcagcaattgcatatgtggttcccctccgttttatcacctggaggacagggctcagaagagggtagagctgtctccaggacaagcccctaaacagtggaagcagctgcatgttatttcccttcttgaggcacatcattttccttgcagttgtatgtatagccccaatacacacatcctgtatttgtagctctaattggacactccagaaattctctgacctctgcgttcttctgttcccatgttttcagtaagtcctttcaattactttgacagtaggtacaactgcctttctcaagcaggaaaatcttctcactgtttttcccaaattagaaaactatttatacctcatttatggtgtggcaggagatcctgcaaatcaaaacaattttctactaaacattatttacattatttaccattttctgtgaaattctaacatgccgggataaccacaatttaaatttattcagaggtcacagtttaacactaagcaaactggaaacctctgaaaagatcccttaaatattcctgtcttctgtcaacattttcaacctggaatatcaaccatttatgcttgattttgtgtaactggggattcaaagcactttaacaatcgtgatctgcttttctaccttcactggcgccagcgtggcttggttaggattctctacacatctgcatttggtattcattagatgcaaagagcattcatgcatagcctcctaatagatagggagaggatggttttgaaagtgttttaaaaatactccgagggggagggagagaggggcgaaaaggttgaaaaagtacctatcaggtactgtgttcacacttgggtgatgggctcattagaagtccaaacctcagcataatgaaatatacccaagtaacaaggctgcacatgttcccccaaatctgaaaaaataaaaataaaataaaattcctttattatgaaaaattttttgttatacatacacacacctgttagaactaatagacaaatttagccaagttgtagcatacaaaatcaacaagcaaaatcagttttgcctgtatacattaacaataaacaaccaaaaagaaaattaagaaaacaattccatttacaaaagcattaaaaagagtaaaatatgtagcaataaacttagccaagcaagcaaaagtcttatacactgaaaaatacaaaatgttgctgaaaaaaaattaaagaagacagtaataaatggaaagacatcctgtgttcatggccgggtagacaatattcttcacataccagtataactcaaatggtctacaggttcaatgcactctctaccaaaatcccaatgacatttttgcagaaaaagaataatccatcctaaatttcagatagaatctcaaggaaccctaaagagtcaaaacaatcttgaaaaagaagtacaaagttgcacatctcacatttcttgatttcaaaacttaccacaaatttacagtaatcaaaacagcctgctactgacataaagatagacatatacaggccaggcacagtgactcaaacctgtaatttctataattggttttttttttttttttgagacggagtttcgtttttgttgcccaggctggagtgcagtggcacgatcttggctcactgcaacctctgcctcccaggttcaagtgattctcctacctcagcctccttagtagctgggattacaggcgcccaccaccacacccagctaagtttgttttgttgttgttgttgttgttttgtatttttaatggagatggagtttcaccatattgcccaggctggtctcgaactcctgaccttaagtgatccacctacctcagcctcccaaagtgctgggattacaggcatgagccaccatgcctggctggaagtcacaaatattgtgacctctggccccatgactcttgagcaggaaggaattatagacactatgcctgcatcttagcagagttcagacccctcccacagtcctattcttgtggcctttcattaatcttacaaaggtggttttcaatccctgagcaagaagggggttagttttagtgagggactattgtcatcctcactttcaagtaagggtggctcacacctgtaatcccaacactttgggaggctgaggtaggcagattgcttgaggtcaggagttggagaccagcctggccaacatggtgaaactccttctctactaaaaatctgaaaattagcctacttgggaggctgaggcagtagaatcacttgaacccaggagaaggaggttgcagtgagccaagattgcgccactgcactccagcctgggtgatagagcgagactgtctcaaaaaaataagaataatataaaaataaatttctcccaaagttagcttggcctatgcccaggaatgaccaaggacagcttggaggctagaagcaagatggagtcaactatgtcagatttctcttactgtcataatttcacaaaggcaaaattatgctatgatccaccaatttcacttctgagtgtatatccaaaagaagttaaagcagggtctcaaagagatatttgaaccccatgtttatagcagcattattcacagtagccaaaaaaaaaaagaagccccaagtgtccatcagtggataaatggataagcaaaatgtggcatatacatacagtggaatattattcagcctaaaaaaggaagggtaaactaaaaataaaatcctagctggacgtggtgcctcatgcctgtaatcccagcattttgggaggcaaagacgggagcattgcttgaactcaggagtttgagaccagcctgggcaacatggcaaaaccccatctctacaaaaaatacaaaaaattagctggccacagtagcgcacgcctgtggtcccagctactcagaatgctgagacagaaggctgagtccaggaggcggaggttgcagtgagccaagatagtgccactgcattctagcctgggtaatagagcaagattgtctcaaaaaaaaaaaaaatcctaagtccccacaactgactgaaaggaccccctcttggccaaggggaccccagaaaattcttaaaaacttaattcccagccgtgacaggaagggaggtcagacatgcctcataatacccccttcctgtcacagtttaggcacaactgaccagcattaacattaaaatagagatcataagactgacagaatagactctctgtggaaataagataccgaattataaataagacagagcaagactcagtctcaaataaataaataaataaataaataagacccaagactatgcaaggataaggttaaatgacaccctacaaaccataaagtctccttaaattgtttttttaaattaacccagtataacgtggcttattttccaacctgactctggtatagcatcacatgagagatagcagacccccttatcttaagcattcctttttactgacttcgcgtctttagatgaagcttaactcttgcaatcaattgccaactaaagaatcctgaaaacccacctatgacttgtaagtccctgctttgagatgccctgccttttctagctaaaccaatatatacctttcatttattgatttataattttacttacaattatgtataaaacctaactgtaacccaaccacttcgtgatcacttactcagggcttcttgagtttttgttttctcctggccacagtcactcacgttgttagcagtagcaaatctgacaggtgtgcagcaaactcaattcttccctaggagaaaagaattcagtcaaggggcataaagcagagtgaaagaccgaggcaagttttagagcaggagtgaaagtttattaaaaagttttagaggctgggagcggtggctcccagagctttgggaggccaaggtgggtggatcatgaggtcaagagatcaagaccatcctggtc

SEQ ID NO: 95740 - DNA, 90670 bp, Homo sapiens
  misc_feature (1)...(90670): n = A,T,C or G
aaagcatatctttgtttcttaaagccttttggcaatttcctgagacctagtagagttctgacaacataattgcccttctcctgaccgtgatagaaattatagcacagctcaatttcaactagcaggcatatttctgcaagtgtagaatttagtcctataggttcaacaaagccaagcacaattcaacaagatatgacagtaattttacataagtataatacttgccagcaaagtgatatctgggatgatcaaacaatgttgaaactcatagaatttcagaatttgtagatctaccaccttccatcttcccacataaataccataagatgagacacatgaagccccagagatttttaatgacttgccagtcaatgtttccacagtctgtaggtcgagaagactagacatcagttctcttgagtcccactggagagccatttgtactgccctatactgctcatagcaaaaactgaaaaccatcaagatcagaggtcactaaaccaatacagctgccccctgtttttgtacagttttaaataattggaataataaaaataagaataagacttgtgacacatgaatattatatgaagttcaaatttcagtgtccataaatctttgttggatcacagccacacccactattttgtgtattgtctgactgctttcactttacaatagcagagttgaatagttgcaacaacaaccatatggcctgcaaagcccaaamcatttattctctagatctctatcaaaagtttgctgatctagacaagtacttgacatcacaatgatttagagaaaataaatcctccagatttatagcactgagccacatttccaaatctcagttcacatcagccaaacaccaagctccttcctttagactaaaaaactctcactagagccaaatatattaagaatacaaacttcattgacatcggcacctgtgtatatcttttaaggccagtgatatcaacttgaagaagaccaaggacatcatcaatgtctgctcctaatttctcatgtccaggtgattatctttgggaagaggggcattgagggtggcaaaagaaccatgtgacagaaatgtaataccaatccatttattctgtactcttcctgataatgcaaaagagttagacctggtagtacaatggaagtcatttctgatcatcttgacacctgtgtttcttctcatagacaggacataacctaaatacgtgacctgacttttcacctagtgttaagtagcccagggttgaaaagacttaagttgcagggtccaggagtttatccagactttccctatttttcatctacctattttatgtttctattatcatccttcagggtaaagatgtgtatattcctctgaactattcaccagcctggagcccctatataatttgagtttattttagtgagcccagaaggagtagaataaactctcctaatgaagagctagaactgaaagaccacataggggcctatgtattaatcttcatcaaaggtacaatatagagcctctcatcttatcatatactactttcagacttaattctctgccatttagtcaaagtaaaatacagaaggagtaatgaaatcacagaactgaggttcagcaaggtccctagagtttagtctaacttacttttatgaaagctcatgccaaagtccagaaagtctcaataactttcccaaggtcacatagttaatgaatggaaaggccatgtgtatcacaaactcgagagtgcaagaattattcaagttccttttttttattaccaagttaatgttggccccaattcccaacctggatttctatttttagtccatattgaggctcccattcttcaagatggagcaaagcttttagattattatgcagctcccaacatcagggctgtctcctggtccttggtcccacaaccacactggtcaacactgttggcccactgtttaaatacaagccctgtggtccagcaacctagtgtctctgtcctatgttggagactgaggagtctatgttgaggatagaaactccagtatctagcgttcaagccatgttcatgcaacttgcaacggtccccaggcagctaccatcaagagatatgaatggatccgttgaccccagtcttgatcaaatcctctttaccctctctgcttcgcataccttgattcctctcctttgagtactcctaatggaatcccttcaatttgtgtaagcttctataaagactggcaggaaataattcctgctttggaccctgtatcatgaacctctctacgaacaaaagactaaacccaacctggttacttactaaacatggaaggaggggaataaaaagtttttaaggagaacgtgcatacattaatatttcaataaattgtcctatgatgtttataacaacaaagctttatatatttaagaacatacagatgcttagcatcccttgggctaacagctgccaaaatttcctgctttggaaaaagccacggaattgtgatgaagtgtttcatctctggagtcagacatgctgatttgaatcttggctctaaacttactaactgtgtgaccgtggaacctccaaggggtcttgagggtaaactaaactctcaaggttcttttttccctcatctataaaatgaagataataatagtaccaacctcaaaaacttggatgacaattaagataaggtttaaaatatttcagtacgttaggttggcacattgttaagcagatggtctgcatttatcagttctgtctcctttaagtagcatcacgttggtacctgtgtcctcattagtaaaataaggatacagttgcttactttatagaatatgtgtaggtgtgaggattagagaggatatagagcatgaggattaaattaagcaatcatggtacattgctgaacactcattacacattatttataaaaataaataaaactttacaaaaaggaaattgagaccaggggatgagagagaagttattattctgtctacttagaaaatcttctctcatcagaattgtttgatgtgaaagaccatcataattatatatctgtgccccacttaaggtttttatttacatctgatctaatatttgctaatgcttcaacctgccaaaaagcaggttgatttgtggtttctttaaaatgaaggcctgagtgagtgggcagttgaaagttacttccaccatttttccagacttcaccatgatggagggtctttaacccagcagcagtggtgtatgcttcgtaactgtatgacctagacccatttcagatactacatctggcttcttccagactatctcggaatattggccagaaaaacaaactcactcaaaaagcaatattgctccataacctccattagactggatggaagtggatcaaagaggacagcagagtaccccaaatgcttttgaagcatgaactccaagatggaattctttaagcagaatgtgaatgctggctttaatgcaagaattaccagttcaagcaaagtggcacagatgtgaactcatagctctgactcacagtgtgaatggcaagatgggacagctggcagttccccataataaaccgcctgctcttaggccaggtctaaggaacagtttatgaacaggacattctggaccaaaagtggctacggttacaatttggaaaatagtcttcacgtgggctacaaaagaagaattggtagttgtgaaacaggcttgttaataacacccacactctttgttattaacaaatgtcaatatgtaggccagtaatctctgactaaagagtatgagccagtcagtatcaataaaaattcagtagacatgcatacagtccatagatagaatattggtactttatcttgaatctaatttttgatttgactgatggcagcaaatgtggcacttggcacatgaaaataccacttagagagctgacaagaggatacttccagtttatgtttattactttattcataaggcaggttttgagcataacactgaataaatggaccaccaggacaaaaataagattcattttatgcataacatagcaatttggagatccactgtcaatagccaatctatggctgttattgactttcagagactaaaatgtcacagagaaacagaaaaaaaaattgtggatttatttataccttcagatagcattataactacgctttcttaggagttaaaaaatgccaatatttatataccaaagacaaaatgttgtacttgatttctagaattacctaagtatttgcaccaccaactgcaagttgacacctttactcaatcagggtatggcctgaatcaatgtttgtagaaagcaaagcttctagtgactactttatttccccaagctcttcctacatttttattttttgaatatgaagagcaggaagagaaaagcagcccttgattaaaaggaagatttttcattattcctttaaaaatccacctcaccctagaccagtccaatctgactttcaaaggcatgacttcctgaagtagaagtggtgaaagatcctcagccatcctaggaatctttcaggtttgttaataaaatctgagctatgaacaccaaacagagaaattccatggtaatggagtttggggcttattgttttctatataaatgaaggtaagcccctggatgcaaaaccactcttaacttgtaactcagctgtgagacatctggtcatagaaattggtcttgcatctaggagatacaaatcactttgctaaccatgtgcccactggaaatcctgaaaaaggactgtgtctggggacttcagacctcagatggacacctacatttcctttttcttctctcttcccttgttttctttttccttttccttcttttcttttcttctttttttcccctaatgagatcttgctttgtcacccaggctggcatgcagtggtgtgatcatagctcacttcagcctcaacctcctaagctcaatcctctcacctcagcctcccagatagctaggactataggtgcataccaccatgcccagctactttactttttatttattttttagagatggggttctcactgtattggccaggctggtctcagactcctgacttcaagtaatcctcctgcctcggcctcccaaagtgctgggattataggcatgagccactgtgcctagcctcctccccgtctttaagccaggtctaatggaaaggatcttgtagggagcaatttctcagactggtcttagacatacccacttctcatgagtcggctggctgttttattgcgtgacaacacatcccatatcatcctcacaacttttagtgatgcaattgttgtagatacgctcctgagatagcaggttttggaaagattaacggtggagaaagacacatggagatgcatcatgaacttctgctcatgcacttctgggtgactgggccagtttcctgaccctctgggcaggaaaggggaaatatatcaagttggcaaagtgtgggcaccctgtgtctttactagaagacttctctaggaatcagtgtcttcaagctggtattcactggctagtcaccttgttgcctaggcattgaatggccatttgatcttcttccctgtgccacctcctactctaagctcagccctgtcttcattattcatcaaaaggccccatataactctacaagtacctactatgtgtcggcactgtggcagacactgtggttgccaagacaaacatctatgacaccatcatagaatgtctgacactatggccatctatgatactattgtcagtatctatggaagtcatggcatctcacacacagtatctgcaccccaaggactctttctgtactagagaagattgccctgggaacattctcagttcaacttaataagtgctataatcatcatatgataaatgttattcaatcttggaagagaaaaatgaccagttttccctggggaagctgagaaaggcattagagaaaagatgaagggcaaaaaatggttttatgtggaggaaatagtacgtgcaacatcgggaaagcctaaaatggcatttttctcaatccctctgcaaactttcaggaaaggtagccagagtccacacagctggtaatagaagacctaaagccagaacctagtctcctcatgcccaggctgttggccttttcactgtctgttcttggaaccattcccattgggaagaagcctcttttaggtaaacgcgtatctggcaaatgatatgcccatgttttattcccaaatatcagtttctctttctgttccataatatatctttgataatacaaagtttgaaattacaatgtaaacttttaacattgcaccaaatcttgagtcagattgactactagaacacttgttttttkttgttgttgttgttgtttgtttttgtctttgtttttgttttttgagatggagtcttgctctgtcgcccaggctggagtgcagtggcaccatctcagctcactacaagctccgcctcccgggttcacatcattctcctgcctcagcctcccgagtagctgggactacaggcgcccgccaccacgcccagctaatttttcgtatttttagtttcaccgtgttagccaggatggtctcgatctcctgacctcgtgatctgcctgccttggcctcccaaagtgctgggattataggcttgagccatcgtgcctggcctttgtttttgttttaagatgaagtctctctctgtcgcccagggtagagtgcagtggctcgatctcagctcaccgcaacctctgcctcccaagttcaagcaattctcctgcctcagcctcccaagtagatgggattataggcacccgccactgcacccggctattttttttttttttttttttgtatttttagtagagatgaggtttccccatgttggccaggctggtcttgaactcctgaccttaggtaatctgcccgcctcagtctcccaaagtgctgggattacaggcgtgggccacgcgcccagcctagaacacttgttttactatgccttctaataactttggggataaacaaattctagtttgaaaagcaaggcccttcagtgtgacctctcatgaaggccacagatcaccaagtgcctcttcaacatgaaatgcaatataaatgttagaactgaccattcaataccttcttaccattttagcacagtaagaaaattaacgtacagatttaaataaattcttatatcatactttgtatagtaaactatgttgatccttaggcagaagaaagtatgtttatagcggccctaaacatgctaacaatacttccgtaacttaaatctgcgcaacagctcctacgttctgtgtgtgcaaattacagcatctctccacttgtacatttatctgttatgttatatcattcagaaagcactgctcaataaaaacatgaggcaagacgcatgtgtaatttaaattttctaatagccatatttaataagtaataaaacaggtaaaatcaatttaattatacattttctttaacacagtatatgcagactattgccatttaaatgtgtaatcactataaaaaaatatcgggccaggtgcagtggctcacgcctgtaatcccagcactttgggaggccacagcgggtggattgactgagctcaggagttcgagaccagcctgygcaacaaggtgaaacctcgtctctactaaaatacaaaaaattagctgggcatgggggcatgcacctgcagtcccagctacttgggaggctgaggcaggagaattgattgaacccgagaggctgaggttgcagtgagtcaagatcacactactgcattccagcctggatgacagagcgagactctatctcaaaaaaaaaaaaaaaaaaamaaaacaatgtgctattttacattctttttgtcatcrtactatggcttcagaaaatggtacatactttacacttacagcacatcttcataaagacattaaatttccaataattaatatgaaatgtaatgctatcaaaaaataaatttgcagttggtgaaatgcagtttactatgctttagctttacattttaagttacttaaaataaaataaaatttgaaattcagtttctcaattgcactaaccacatgtagctggtggctaccatataggactgtgcagacctaggagttcaagtgaaagcaaacagaaaatacgggcagcatcaacatttgctgtagcaaagcataaggggattatgtttaagaagggatcaaagggcaagtatgtaagagattgtaaagagataaaaactaaactttggagttaaactagattatctctgttgctttttattggtaacctcttaagcctcagttttcttatctgtgaagtaaaaatacctgcattattgggcttctaagattaaatgagagaacctaaacagtgagcttaacacagtatctagtacattccaaaggttcaataaattataactagttttattggtatctatggaaatcatgggatctgttttgcatttaggtgtgggaaaactctgatggggttataatttaattaattacttgtgagatgtagagtaaaaagagagaagaattgtggggtttttttgtaaattatatttcatttacagcatggtgaaaagtgcaccagtcatargtatacagctcaatggatctccacaaagcaaacatacctatgtaacaaatgcagaaatagaacattcagagaatctaaaaaccatcctcatgctcctaacaaaagtaactactatcctgacttctaacactgcagatctgttttgtctggttgcatattttatgtaaacgaaatgatacagcctgtacttttttagatgtctgacttttttcactcaacaacagatttgtgagatttatccacaatgttgtgtggagcagtagttcattctttctcattgctgtattgaattccactgtataaataccccacattgtatttttccattctacaatagttgaatatttgggctgtttctagattagggcaatggcaaatcttcctgctacaagcactcttgtataggtcttttggtgatgtgtacgtactggaatttgagttttcaatcttggccttgttgaaaagagaaggctcacttctcatgtaattttatgtgcaggcaccttggataagcacaaggagttggaggaccttgtggctaagttcctgaatgtggaagcagctatggtctttgggatgggattygcaactaactcaatgaatatcccagcattagttggaaaggtgagaattgttaacntaattgtcttctactgtattactcctaagaactgtaactctgagtaggtccttgttagaagtatggctgagatgggcacggtggttcacgcctgtaatcctagcactttgggagcccaaggcgggcggatcacgaggtcaagagacctagatcatcctggccaacatagtgaaaccccgtctctactaaaaataaaaaagttacctgggcatggtggcacgcacctgtagtcccagctacttgggaggctaaggcaggagaattgcttgaacccaggaagtggaggttgcaatgagccragatcgggccactgcactctagcctggtgacagagtgagactctgtctcaaaaaaaaaaaagaaaaaaagaagaagtatggctgagaaggttcttttcgtaggagaaactgattggatattggtatttttgaataagtatgccagcttagtccagcaaatcttgtcatgatattgctgattatataattgcagccctagacatgggtcagaattcatcttcaatgacagtttaacaaagcagtcataattttgggctcctgagttcccatctgcaacttctcagagctaatatttattaagcatttatttggacaaaatatttgtcctacattacccatttattttttcattcaataaaccaattattgagmacctactatgtcctcatataagggaagatacaagacatacaaagatgaacaagacctatgtattttaaatttatgtagtttagagtctaatgggggaaacaatatgctgaataaaataggacaaataccatagaaaaggcatgcccatatacgaggaaggacaaagagctgcccaaaacccttcctgagaaagtctgcaatgtctgtgcaaaagtggtgagaggrgaacagaattttaacagataaataagttgaattatttaggacacgaagagggaacagcatgtgtaaaatacataggtttggaggaactagaatatgkaatggtggtcaaagaaaagaccagagatgaaagcaggtgccaaatggcaatgagccatgtaatgacaatcatgctggtgtttgaaattgttcctcagaaaaaaatgggaagttggctggttcattgcaagtaagcaagtacattaatcaaatttatgcctttgaaaatgtgtctcatcacaactacatgcaatgtatggtcttagactggattttgcaccaaacaacatcaaacgaatgataatgtctataaaaagcttaagacatcattagaaaagttggggaaatttaaatttgaactgtctatcaaatgatagtattgtagaagcattgaacttcttggatgtgatcactgaattgtgattttttataggagaatgtcctgttcttagggaaggtgaggtagaggcttatagataactcctmaatgttccgccagaaaaattacaaatatgcatatatctagagtacaaatatatgggaatttttgtggcttttgcctcaaaaaaactcaaagcatgctgtatgtgaaactacagaaatataatggagtattcaaagattctggaagaccacaaaagacaaaggtccaccataatttgcctgcatttttggtatgcttaagaagttttacaatttagaaatgtttagtttaaaaagaagaatacttttacaaagggtaatttacaagcagtaagttaggctgactttatccacatacctcagactgaattgccatccatacttctccaaattcaaagtttttgactgtaaaactgaagtttttgcatacatgggatgttaatacagtggaaaataagaatcagaagtaagagcttgaattgtcctgcacaaaagacccttgcctttcaggaagaataactaaaactgttccaaataatctctcatggaagtgcccctacaagttcataacccacccaaaaatctaccagtcttcctgtcagagatcaacactttaggctctacctggtgcttaacaaggatcttggatgaacttctctactgaaaactatatgcaaatgtcgcagtgaacatgtaatctcttaaaacaattcccatctccatcagctaactgctanacatgattttgtccacatagacacyaggttaaactcttggccttttaaaattaaagtgagttttagaaattgtgttataggttttagagtgtcttcctgtccccacaagttgtttttccttggttttatttattggcttgtgttttgtgtgcttgttttctrcacagggatgcctcattktaagtgatgagttaaaccacacatcgcttgtgcttggggcccgactctcaggtgcaaccataagaatcttcaaacacaacagtgagtatcantktatttwctcaacatgtactggattgctcctagaagaaagtaaagattattgatgaggytttgttctgctcttcaaggtgacaacgtagcctcmtgaaacacaattatgtttatattcactcctggcttgttaacctctggtgacctggaacaaatggttgaaatgcattaaacatccaaattgttaagtgtaacccaaacacattaatgtcactgttagtggttttgcaatgtggcctctaaatacatgattgatctctcaggactgccatttaattatcagaagtgttattactcttccctttctacagctctgccttgggaaagtttgaagacttaagttttgtgttaaggtcaggtaaaaaattagcctgttccttagaagaatgcctcctttcactttgcccacccacagatgctcagatccccacccaacaaaaccatytattcgacttcattgaaatgtcctttcagggtctggtttgtgtggctgggtggtgaggagcaggcagaaggctatttcttcttttagggtcttgatgaggcagcatggaaattatcaggaaacactttgaaggaggtggatggtggtggacatctgagttctctcgtccagctctgctcctgacttactgtgtcactttgtataaatcctttcatctttcttgcattcattttcctcatctgtaaaatgaggtgtcgaactctgtgataggtaaggatcctcctggttgaaaggttttgattctaatttgttattgtcgttggaaaattcccttctttctgtgcatgtgtacatgcatgcacacacatgcactcacacacatgcacacacgtgtacacacacaaatttgttttctctttcttccttaccacctttctctcctgccttcccttccccttcatttttccctgttcctctttcctagctctcccctccatcctccaagaaggtaacaaagtttgaagtgacaagaagaaggctgacggagaactgaggaagaattgtttcaattctgttctgcccacctcgcagcaatcttaaaccaaagaacaattgtcccatgggggaggaaagaaaatgcatgggagtattctcaagtgaacccccttgtctaactcgtagagttgttcaaatgaaaaatctatggctctcactgagtggggtgaggtctggctatgccttactgagccgctttcagtagctatgtgaagatgaacagttagagtgcagttcaggaccagaccttccagaagagccaaactatggccccctcagacttatagggtggctataacatctggcttaatgtcattcaaaatacactgacctcatttgtccattttgcatcaaacactcaatttcggctttagacttggataagccaagttaaattctttcagttctgcctgaaatatcatggattgtcacatctagactcaaatctttggcagtgttgggaattcatgtttggagtagacgtctttcaaggctccaagtaagtttattaagagactacaaggaatgcctttggtattagcacaagtgtgttgtgccctttgattcttcagcatgacagatgattgctgatcaaaggctctgcctacttggcaaaggataaaggggatagctaggcagtcattcaactgtagttccatctatgtatgtggttaaacgtgataatctcacttccagagagacgtagtcggggtgttatctctttggaacagatcaacatgatcatcatcaatgtaaaccccttgtttcttcactccattctactgcgtcagtgctcataatgctagctgcacaatagtggcatctagggaacatccataaaagatcaatgactgtgcccacctcagatcaactcagtccaaatatctgtcatatagatagataggtaggtaagcatacatacatatataaatgaccaactgggagactaaacgtaagcttcattaatcattgaccaagcattccctattctccagcttaaggcttttagggtagaaatcctccaagatgaccatcactgggttggggccaaaacacctgcatttttttctgagttccccagatgattataatgtatactgagagatataagacctagaatcttattttttgaacctcctttaatctaagctgtccccagaccttgccagtgtgccctgggatatatcaccagacacctgccatattaattatcctcactcttcctctctctactcttttacactcttgatcgaaagttggcagagaatgtgttccaagccaacatttattaagtgtttattatctattctgattcaggcactatgttagccctttgaaggactataaaagtgataagtaatatcttagctatctgagggcttggaatctagtaggaaaggtaratatgcatgcaagttactgtataaagtgaaaagggccatgatgacatcaagcagtggttaagagtataggctttggctacggtgctttctcacacccactaaaatagctaaaatttaaaagatgacaacaccaaatgttagcaaggctatggagccaccactagaatgctcacccattgcctgtggagtataaaatggcacaacttctttggaaagttatttggcaaggttttataaagctaaacatactcctttactatgacccagaaattctatacctagatatttacccaagaggaatgaaagtgtgtgtccattaaaagtcttgtacaagaatgttcrtagcatctttattcataatagccaaaatctggaaacaatccgaatgtctaccaacaggatagtagaaaaaactattatttatttatacaatagaacactactccacaattaaaaaaaaaaagcaacaagctactgctacacataacatggctgactctcaagaaaaattattttaattattttgagtgaaataaaccagacacaaacgtgtatacatactgtctgagttcatttgtagtcaattcaaaaayagacaaaactaatctatgatgatagaaattataacaatgcttgtctctggtttggagggagggaattggtgagaagaggcataaaagaactttctggggcaatcttttgatggggtgatggttacattcttatttaaattcatcgaattgtacacttaatatttgtatgtttccctgtaagtaaatttaagctaacaatattattataatcatacaacatatataaaattaaaaccattgctccaatattttaaaacaaagtacaggctttgacccatgcatttgtgtcctcatcctacagcttattagactgtgaaactgtggtcctagacacactactttaccttctggatctcaatttttctattccaaaaatgaggataattatgatacacaaataatactgtggttggaaaaggcatataagtgcttagcacaatgcctggcaatgggaactactgaattatttgtagctgctatgttattactattattaccctcgtcattgtcatcagtgtcactaagggacagtagaaaacattatggaaaaatgaagagtctatttctccttgggaattgcataaaatggatggcatttgcagtagatgctgaaggattaagataattctaatcagggaagaagaaaagattatttcaagcagaaaactaatctggagcatgcagagagcagcaggactttcagcatgacctgaacaatcatgctaagaatgtatgtacttcaaaaagcaacaaaaggcacctgggagttctgcttcttaccatgctgttccccagctaaactggtttttctcaaaacatttagttgccttctccatatgtctagtagagatggaaacagagacacaagctttaagttaaagctttgaacagcactggatgaaaaaaaaataataattctgaagatcgtctgtctctacagcagtgttctcttagaatttctctattctctgtttttgtgttgttttgttttgttgttgtttttccatttgctattacctggaagtcatcagtgaggggcagayggaccctgtgtgtctccagatatgataccctaaaaagcctttgacatcatttatatgggatgcaggttagagcactgaatcctgtcaccagacaaccccaaattaggaatgttctatttttaaaaagggaattgtattctctaaacatgtcaayaccataagagacagtgaaaggctgaggaaatggcccagattaaaggataagaaagaacagtatcagccaagtgcaatggcgggtcctagactagattccaaaagagacaggaaaatgcataaaggaaattactaggccagtttgaaaaattggaagatgcatggtaaattagataatattagataagaatagtgtatcaacattaaaaatactgaagtggatcatttcaccatagtccaggggtagacaacttatgacctgtgaactaagaacacttttacatatttaaagcgtcgtataaagaaaaagaagactacrcaacagagactgtatgtggtccacaaagcctaaagtaaaactatctggcttttttatagaaaaggtttgctgaatcctgctgtaattgtatgagaataccctattcttaaaggggagaataccctattcttaaagaagacacattgaattatttaggggtaaagaccatgatatatgcaactttgtcttaattcagggaaacaattgtgtgtgtgtgtacacacacatttaaacacaggtggacagacatagctataaatatgcatagacgagatgattaagcaaatgggataaagtgttaataggtgaatctaggttaaagtaagtgggtgttctttgcagtactcttattcttggaatttttctattacgtttcaaattatttccaataaaattttcccttaaattcttaactttttgctgaaattacaatttaagggttaaattttatctcccaattttacaaagctctcaaaacattcagtaacttattcttcatgccctccctttgtactcatgaaaaatagataatagttactatctctatcctaacaatgaatgttagctgttgttatttagactagcaactaacatttaytgagaaagtcctctgtgccagatgctgaggtaatggccttctctaatttatttagccytgtgaagaattccatgaggtaggaactgctttacaaatgagaagattcaggcttagagttattaagcaacttgtccaagatcatacaactgattaatagtgaagcctggagctatctgggtaaatactgcccttcccaactaattgagaattgggtgcagctagggtcagagtctgtcctctaacccatgggagtctattatgcctgagctgctgttgctcttctgctctctttggtaggaaaaataatgctcaccctccaaagacgtccatgccctcatccccagaacctacaaacattatgttgcctggcaaagggaattcaggttgcagatggaattcaggccgcaaaacagctaaccttaaagagactatccacgtaggtctagtgcaatcatagggttgttaaatgtggaaaagagtggcaaaagartgaggatcagggcaatgcaatgtgagaaagacttaaagagcccttgctggctttgaagatgaaagaagaccacaagctaaggaatgcaggaagcatttccctagaagccggaaaaaccaaggrcatggattctcccctagagcttccagacagaaatacagccctgccaatatcttgattttcacccagtcgaacccatttcagacttctgacctctagaactgtaagataagtttgtgttgtcttaaagtcactaagtgtattctaacttcttacagcagcaataggaaaccactaggctttcattcacaggtgcacaraacccttgttcccacacacccacatgtttaatacaactttgaaacacgagcatattctgctgctgttgtatttacatcacaaaaacagaccccttgagagcagttatttccagggtcctctgaatgacttctttcttgagaggtgagggaagcaagaagtataaggacagggaaagaactgaatggagttataatatgtacagcatcagatgctgctggctctgtttcttgctctgctattcccaagataatactaactgctttagtatgcagtgatgtcttaatccttcatatgcatccacacagattggactgataatacagggattgtttaggatctgcagaaactgtatgtgcatgacacacacaaccagtccagatagaagctaataacttgtgagacaggttttaagaatggccacctgcaccagagcattcttaaacaatgggattgtggaatttcatgcaactctaaacttgttctgctctcacrgactgtcctctgcttcatgtcctctccttacaccttaacaatactcttctgcctgttggagaggaggaggttctattttttagcagtaccaatggaagtggacatcctttgttatttaagccaactataaatgaatcagaattctgggcccttggattttttaattctctgtaggaaaaaatacctaagatatacttaaacctactcagaccatcataataaacttttaagcctgtgtaaataggcttgaccattaactccaaagctattcattattattctctctccatttcccacaaagccagaatgaatacctgagaagactaaatagaaggaaagttctgcaagggagcaaaatcagaacaccgaaagtctatttcctaaaaaaacaggaaaagactcagaagtgcatttttagtgatgctaaattcaaaactgggtactagagccaggcctggtggctcatatctgtaagcccaactactcggttagctaagatgaaaggctcacttaaggccaggagttcaagaccagcctgggcaacayagcaagacctcatttcttaaacaataacaacaacaacaaaaaaaacacctgagtaccagaatcttttatcaccatagattagttcttctataatagtacatgtggataatagctgagtcataactactctatcatttattcagctttcactggtattaagttcttagctaactggttcatttaattttaacagcaacccagatacagagttcttttcattatcctcattttattaaagagaaaactaatcctcaaagtgattayatgacctgcctaaggtcaggcaaatgataaatcacaggggtcaaaatgcagacccaagtctgttgcttttgtcttggtttgcttcccccagcagcagaccttgagacacggatgtaatcacaagtcacttattcagaaagtgatgccaggaagcaccagtaggtgagcagggcacaggaagcaccagtaggtgaccagggcacaggaaggcagccaacatggtgcattgtcaagcaagtgaccagagtggacaacaggacctcgattctactaggaaactctgggtgccaggatagataactcactgttatccctacctgtgggctgagggagctgaagtatttacccacaaattcccatttgtgactgattgaaggctgctccctaatcaggctatgttcccacagccagaaaaagagctcttaggcaaagaatggcctgtgtttgcatgaagaagctgggctgagagggtataggcaggatgtgcacagcacttgttaacactcttaaccactagctgagtccagctatttgctgccaggccatatgtaggagtcagaaagctatggtcccttgtgtaaaactcagtccagtgtgatggctaatggagccctatcctgttagtagcctcaatttcaattcagaatgctgaagtttggcctctgcattcttgctcgctgagtattaaaaagatctctttgcattttctactgtgggcagcttcagggacatagccaaccctcaggctgcccttgtgctatccagccattctccagccatttcacggcctcagctacagagtcagctgcaaccaggaaccaamacatttgttctccatggtgtttctggtgcattttgaggaaatgagcaaataatgaarttatttttccccaatatttctcaggctttcatatgcacacgaggtacttgggggctcttgttaaaatgcagactctgagtgagcaggtctgggtgggggcctgagatcctgcattctgacaagctcctgggtgcygctgctgctactgctgctgctgctgycatgcagaaccacactcagagcagcgagactgcaggcaacctcggtcctcaagtgagtcactaagactttcttaagctagcctcggagaaaagctgtttcttcagcttagagagttgtcatgaggtcagaggtccaggcaggtcaagaatttggagtagtttaaaagaaaaagtggaaaggaagaaccaaaaytctgcctactaaagaccaagaggaggaagaaaaagaaggccagtgtttgccagaaaactctgagcactacctagtctgcagaacaagggctcgagaggttgtttaagtaaaaagttaaacccgtaaacatggcttagactactttgcaagccatgatcttttatatttcaatgtccaacttggatttctaaactaggttgcttaataaagccagcaattgcctccctatcttttaatgataattaaaaggtattgagccttcattgtaatgagccatttacattcaccaactcattttagcctcataactacaaaatgaatcacctgctactcttatctcctttttgacagatgaagaagaaacatctataaagtggtgaagtgacttagatacacagagctagtaagagtcagagctggtaaacytaggaagtctgactccagagtctccgtttttaagcatgacacgctacctcctttcctggccttttctaccctctgtttgcccctggatggcagagtgatgaatgtaatacttggtagcctccatctcccgtacacctctcccagggccaaggcagttttggttaggtagatgctgccagcacccacctgactgagaatcctaaccactgggctcctacactgttccctgaatcatgtctcaccttggtgcattgagccccctcatttagagatcccatctcagtactttgtctcattccacaatctccttcctgaggatcagaatcctatgcattacatcaagcccagagcccaagcctattggacaccctgtccctggtttctaggttctgcctgtccttcatctcatgcctacagagtcaaaagttgctgcaattaccccctccccctgcagggtaaacaggccctgtcmctagcacctgcctcayccataagcccaacccaggtcacctgctctcagctgtcttttgcactcttccaagaagatccctttgcttctttcaactgcctaaggctgtgcgacatctatccacatgtttaaagagccatccagaaaacctgagccaaagtccttgcacaatctgctttataaaacttaaaggcaccagattttcagtcaaaaatgccctctgtgatctcatggagaacagaccccataaatgtgactttcaaaaaataattgttttgcttgacaaaattggtcattgtgattttgtttccgccgaaaggctaaaaaagggggacagtcctccccaccaccatsttaaaagtaagaawaatttctttgtcatcattcatagctatttaaatacccgctacttactatttcacatttgggctgaatcttgaaggatgaaactgcatgtccaaaggaataagaggagtggatatagagatggggggtaarggactaggaacagtaaaaagtracattcattcatcatccatccatcttttcatttacaaaatatgagtgccgctgataggcagacacaaaaatatttttgctgagcaacccagagagtagggaaccaaagggtgtctctaaatgcagatgaaagtagtttttgtggggtcatggatgacaaagaataaaccaccaaccacaccaggagcatatggaaagtggaggctgagtttcagccccaatctcgcattcctggatccataggagagggagcaggggcactgagaaatgggcagtgagtgaagatctcacagtagatctaggcctttggaaaacccacagctgcacaagagaagagaaaggaggaagccctgatgtatgcaacagtgttgccatttgacagtgaaataagaggaaagctaaatgtctgggttttttcttccggaagacacactatgaactatgccctaccttcttggaagattctgggtcccttgctgccttgtgctttcttttcacaaaactgcatcttcagcttttccagatccaggaggcttgctattattagggttttgaatgtaagaacaggcacaggctcaggctggctaagagcatttgtcacctaagcctgattgtagctttggacacatagttggattattccaagtatttagtaattcagtaatccagttaactatgctggcraaaggctaggactgttttgcactaggcaccagaacatggtctccacattttcatttcttatagctagatatttataaccatctgatagggtttggctgtgtccccacccaaatctcatcttgaattktagctcccataattcccatgtgttgtgrgagggacccagtgggagataattgaattatgggggcggttccccctatactgttctcgtggtagtgaataagtctcaygagatctaatggtgttataaaggttttcccctttcacttggctcccactctctcgtctgccatcaygtaagatgtgcctttccccttcygccatgattgtgaggcttccccagccaygtggagctgtaagtccattaaacctcattttctttataaattamccagtctcaggtatgtctttatcagtagcgtgaaaatggactaatacaccaccaaaccagctcaatccttttagtcctctacaaaccaaaagaaacctccttagtgagtcaaattttgtgctgagtaacaccaaggcattattaatgctcaaatagtggtcattttaagtccgtggtgtgtcattgtgactcaagaaccacactgtaccatagcaccgtgtgtgtgtgcctagatggtgtcaaaattatacttttattttaatttccgtatctcagaattttcttattaaatcaacaagaacaggtttgtttggagggcttttgtttggggaacttttttwaacaaaacttctggcattgtttttttcatctgcaaaaaacaaaaacctaacagtccttccctacttctcagaggtgtcatggggattaacataatgcaagtgtaagtgccttaataagcatcattattttaaaaaaaatcccttgcagatgtaagcatgcagcttgctgaaacggtagaatcccataaggcctacagaacataaatcacaatcccttaaatctgcgggtttgtaacccacgcactgtagccttgtagaacgacagagaaccagagaggaacatgccaggrgctaaggtggggccagaatccaggccgagcgcagtcttcccttttcctgtgtagcttctgtgattctaagaggtcggagagttcatcccctgcaggaggaaaaaaaaaatggctaattgattttccttctgctcaagaatcctggtgtgttgaccctggggggctgtgaactccaccaaaagccactcccatggctatctccattcaagtcaaacacaacgaagtccctgacttggaaaagactgggattcctcttgcttccctccgcaaaatgtataaaacacagcgcggccaccgaaagtcttgttttcatgtcttgcgtgttatttttaaaaatggagaaaagcttctctttaggactcgtggtgttcattttaaaattctggattaatccatcgtgtttatgtgacctttttggtgcaaaaacaacacagtggcctctgaatttacatattttttccaaatcttagaatattcattttaaaatgactactaatttagttcacttgggtttagtttttattccagtgtcgtcggagccacatttaccatctatcatttctgcacaaaaacttataaattccaagtcccaaagggaaaacattcttaacaggaatgcttttattcaccatctctttattccattcagaggatttggttatagaagatgaataatagtataaaatattatagacataataaataaaagattataggaaaggaagactggttctccaagtcgcaaggttttcttcaatattttaggaactctgcctaaagcaaaagtgaaaagaagatacccaaataggtgaaagtttattaactgaaaatttcaaaacaagaaagccgctttttgtttccttggctgccatctagtggttaataatgtacgctaaaacacgctcttgggaacgttcaaaaaatatctatctgctcgttttaaaacaaaacaaaagataccatcaatttttgaaaatatattgcaggtaggagatatttatcttttctaataattcttatttctatccacaagtggcatttccttgcctgtctcctagtctacgttctttctccaggaaaagaacattgatgcaattattaggtaatgattgagcctagtactgtgtactaagactagggcgagaaggatgaggacgaggtccctgacttcatggaagagagacatgaaagcaaaaaacgaacatcgcgatgagtgcttaaaaaataatagacaagtcgggagggacaccaaggaggaagcccttaactctgttctgtattattgacgagaagagtttgggttaagacttcagtgatgagtgagcattctccagacagacaagaggaaaaaaagcatggaggagaatcaggaggctgtgtgttgggggatgttgacaaactatgtcagaaagacaggcagaggctatatcaggaagggccattcgagattgtattaggcaactattactggaacaaacctcagttgccaataataatcagcaagtatttctcactggaggctgcagktgagctggggtaaccgtgccctacgtgccattaatcctctcccagggccaacctgagaccagggggctagcctgggcattttcttttcctgtcactagcagaagcacaagagaaagagtagaaatgcataagacctcttcagatctaggtttggaactagcaaactgtctcttctctgtattcygttagccaaagcaagtcacttggctgaacccaagccaaggggcagggaaacgttctccactggtgagaggaaaggactgcaaagtcacagaagaaggaactcaaatgaggtggaaaatgggccagtaatgtagtctgcagcaagttccatcttggaaatgggtttgaggttcccatatttgtctaaaaaatggtaagaaaaacattatrtcgatcaaagtagaggtctcgctttgcgttatgggttccagaccccagggatactgagcatacaaacgtctgggccctgacccacaccaactgattcaaaatctctgagtagaaatttcgagaatctgcrttttaactggttacccagatgattatttctattcatcctgaaggytgagaaccactggaagattaatgagaaaatagaaaaaaaagtcaaggagaaaacataaaaggaaaatgggttaaaagaggaaatagtgctcacaaagaatactagaaatagtgggaaaaggaataagaaaaactaatgaaaaatggtgtccagatggcagagggaagaagcttaaaagataagtgtgtgttgaattgtgtcaaatgctgcccacggtcaagtagaacaagaactgaagaaagctctgtaaatttgtcaattaggtaatattatgtgaaaagaacacaatagtgatgccaggatatcaggaggcctgttttgcagataaaaagagaaaaaaacaaagaaaaggaaagtggcatgaaataaaacaaagatccaccattcttccaattcttctttcacgggtccttacgatcttggtgaaattgattaattccacatttaaactgacaaagcacctaaagagttagtttctggctagtgattaaagaaaggaaaggaaaatgaccttttttttttttttgtatctgttggttctgataacatgccagatattattggtagcatacaggtagcatactatatctaatacctaaggctttatatatttgaataaagaattattcccttaattcttcattatttcattatatatttcctttattttttcattatttatgtgatgttttcttaaggaygttaaaggaagtcaaatagtgtattaacactactgtttggatttccaagagatcttgctagtatgcagcatcttattcatgtcacatgctttttctgaatttcaggacccgatacccagtctctagtgggtggatgctgaggacagcttggaaggtgccatgctaacaggggcctctcagagatgaggttctgatattgcactatcaaattctgacttgtcctatcccactccaagtcataggaagtcacctttatttaaatgtggtttgcttaaatgtacttgataattaaaaagaaacacacacacacaaatatattcacaactctatttcaaagaactatcttgtggcctcattgaatgtggcagagttgcagtgtggaaaagttaatgcagccactaatgcattcactcagctttgggggaagccctaaaacagatctgagcacagactggagactcaaagacaaagttgaagggctctccattgagaccaagaactgcagctaatttgagcytagaccagtgagtgataagccaatgcacatacgcttcttgagagctttgtctgtagtggtcaaaaccagtactgactatgcagctttagatttatctttttttttcactttgagacagagtctcgttctgtcacccaggctgaagtgcagtggtgtgatctcggctcactgcaacatccgtctcctgggttcaagcaattctcctgtctcagcctcccaagtagctgggattagaggtgcctacmaccatacccacttaattttttgtatttttagtagagactgggtttcaccatgttggtcccgaactcctgacctcaaagatttagctttgctagatgtcaccttttgtgagcattttaaatggtgtttctaatgcctggtgaacattgcataacagtcaagccagcagttaagtagcatctccatcttttaaaattaagattggattctggacctaagtatttcagtttcatcttctcaaaaaagggaaagcttaggaaatgcaaaaaatacacagtacaaatataatcagtctaaaaaatatgcccataaacctcggccatttttttcttgctaggcttaaatgttaaaaacaaaataatacacacacatgtacatatataccaaacagctaggttggtaggcaagttcttctaaatgacctctcaacccaagcccagtcatcaacctctgatagcagataaatgaattgtcactattgattatatttgacattagaagttaacaagattattctgccagacattyatcctcccttgttctacatcaccatttcatttgagaagaagggacaatggctttcacataaggcagcaaagggtagtgttacaaatgtggattacagtacagactacatgggttcaaatcctgattctgttgcttatgatagacctcaggcagtttactcaactcctctgtgtctcagtttcctgaaccacagaatggaaatgctactagtacttcctccagatggttcttatgaggattaaatgaggtatgacaaaaactgagcttagaagggtgcctggcacacagatagggctcaataactgtgagctattattgtgttcagagatccccaaatattttgaaaaagaggcttaattgtcccactgctttaaagttttgaaacttctaagactgggggatgtcagaaatcaaggctcaaagtgtaggaagtgagatccgtgcaaactcagctaaactctaacatgctcatgtctacacgattgatgagtggtattaattatgtctctcagagttcatttcagcctgcaacaaagcttagacctaagagatgcatttaacgtagaatttcaatctctctaaggcaggcggggagagcctttaagagcctaggaaaccatgccccactggtgagagtttactctgcctacttgtacaaatccaactatttgtcttgtcagagttaagttctactgaaaaatagacctctgtctctctctccctaagggttctctgattctgaatttgttctctgaaagtttaggtctgagtgtgaacataaaacatctggaaaaagaaagtggaaaaggaaaagtaaaccctttcatgwctcaatttttttttttsgtattatttaaagacacacaaagcctagagaagctcctgagagatgctgtcatctatggccagcctcgaacccrcagagcttggaaaaagattctcatcctggtggagggtgtctacaggtatgtaaataacaggacacattttacgactcggaggcctgcagcaagctgaccagtgcggaaaggctcacctttcctagctaaacagagaaatgacttagaattggttatatgacacagggacctgagacagagccaccaatgggagctgtcagacgtgggttatctgtctttttgatgactctatatatggcacagcagcttggaggctggccggcttgtgaaggcttcctcagaaatatcctctcaaggcattgctaacttgagttgatctttccactacctttgactgccccagagtttcaaaggcgtttcgcagctgggttattcaagatcaaaacactccttgcctttatgactggtagaaattgttgatgggtggcccrgatgcccctacctggacagcacgcccaacccccagctgcttgctgaactttgttagtgattgccatcaatacaaaagatctgcctgttttccccaaggtaggagtaacctggggtgcaattcttgttccagagccagcgggtaggaatgggctgatgtctagtccataagccaaggagacattatttcagagtgcccaatcctgaatcaattctcaaacaatcctgacgttaggcaaattgagggggatatcycctataatgatagaaaagtgaaaaatattaaaaggaaggaagtgaaggctgttcaactttaagacaaggaggagtgtggctacaaaggagacttgaggatagacataggatttctttcagcccgctaatctcattagtccctgagtgcacattttttctgctrcatgagtggataatgagcagcagcagaagtgtgcctttattccttttaagaaaaaaaaagtgaattctcccaactctaaaataataataakaagaagcttggtttcattttatttttaacatttttaactccagtacttctgcccccatggttagggttctggatgttcccagtcctactgtgggaaatgcaaagtttgcatttccagtttctaccagctcactttctgcatcacctaccattacctcctccagccagcccagagagtatgtactgttgatgaagtctttgggagcactctagacatagtagttctccagggtgagcttgtccttgccccagcctaggcacatttggcgattttcagtcattataactgcagtagtgtgtgactggcatatggtggacagaggccagggatgctgccaagcatcctacgatgcatgggacagcccctacaacacagagttatctagctcaaaatgtcgatagtgctaaggctgagaaaacctgttctggtataactgacaactcgtaggccttaacttgcaattttaagaaataatctcatattgactctgggctgtcataacctcaagcatggatctttttccctgtgtgatttgtgcctgctgccagcctgggaggggagcaaatagcccttatctaaacacctgtcattcaggcctagattcgtgggaacacagatcagctgagagagagcagactgggcatctcctttaagcagagtaaacaaaacccaactgcaaataaatagaacttggctccagtaaatgaaagttaggtcttaaccactttgatcatggctgaaattaagtagacaactggcattttactggcaaatattcccatcagctacacagagaaacaactccagcagcagggcttcttagtggccatgccaggcgcctgcatcccaccacttcagaaggacaagggacccaggtgtggacttccagctccaagccagagtggtaccaaaccacaattttggttgcactagcaatagtgactgctcagttacctattgccatgtaacaaaccacccaaagcataatggcttacacagcaatgatttattatttcccacgctaccgtgggttgtgtggaccaactgggcagttcttctactccacatggcattggttggaggcctctcatggaggccacttcattcagctgacactttgtctggggctggaacatccaaaattaccccacttgcacatctggccctcggtactggctctcacctggagtgccatgctctcttccacacagctttctctatagatagtctcttctcattctgtagtctagccagaactcccttacaacgtggtgctggcttccaacagagcaaaagcaaaggctgccggcactgagacattatcacttctgccctgacccattggctcaagtacatcatgaggccagccccgattcaaaagaaggtgaaatagaccctaccccctgatggaggatccacttgtatgtakaaggatgggaagctttgcaggcagccatctttggaagccatccaccacagtggctcaatcaacctggtgatgacacagagtgaagtccccactttccaagaattttccttcacaagaaagttcctttcatttcacccacacaggaatgttgactttaaatgagaccaagacytaaaaggccacattcacagataggtaacagggcatctctttgacaagcctcaatcgctcttgggggcttcaatttcctcatctgtaaaataaagatagcctagagttgagttctacagccttaaacctcaaaggaaaagcctttatacaggtgttctaatttgcaactatcaccagatatttcccataaggccaggtgcagtggctcatgcctgtaatcctatcacttcgggagaccaaggcaggtggattacttgaggttaggagttcgagaccagcctagccaacagggtgaaaccccacctctactaaaaagacaaaaattagccaggtgtggtggtgcactcccataatcccagttactgaggaggctaaggcacaagaatcacttgaacctgggaggcagaggttgcagtgagccaagatcrtgccactgcactccagcctgggagacagagagagactctgtctcaacaacaacaacaaaaaaaaattatttcccataggattttccaaaggagggttaggaatgtgaagtcaatagttcacaaatgcactcctacttttcggaggtatattaggaatgcatatcttgttggtacctacacaaagcctcctttgaattttaacttccagattttttctcttgcttatggtctgccaccatgggtaaagcacccccacatacatcascacagagcccacatacatcaattttttcataacccccaaagagagcagtcagccaaatcagaaagtttcagggagatatcaagatagaaaaggctagatacccagtctgagaagtcagacaactccacaaaactaataataataatgtcaccattcataggtattattattcatatgtagaatatagaggagtcaggatttggaggcaggcctgggacctaggttcaaatcctggcatcaccacctacatctgtgtggcctccatagggtactttggtaataataaatattcaatgaggtcatataagctagtgttggcagaggcccagcccatagaaagctcacaaccaagagtggctgtctttattgtcacattgattttcagtctaagaagttgcaactcagaaaacaataagtcatctatgttgcaaggctgtttgctcttcttccatccagaaagtggctgttagagaaagaaactcacactgaccatgtgtctactccttgctaaacatttcccatgtgcagccttgagtaagcctccaagtattcctgaagttattgtgaatatgaagaaattgaggctccgaggcttagattacttgccccaggacagataaccgagatgaggcagagcggggattaaaaccaggtggccctgatgggacaaaggctcaatgtaaatagaagagtcagcccatgtgtccacatccaatgaagtaaacatggaaaatgcaagatcacccatttgacctttaccattaacctatctaggcctcagtttcttcatctgtaacacaggggcattgaaacgtaaaacccaaagtttcatgaatgcatgatttggggtttaaaactaaaatagtattatttcagtgttctgawctgtatgttttcattaagtatcattttaaaatcacattttctaatttcatgtctctgagaagtctagatcccttatcaactcatagtggttgagaatctcaaaattattcaaaaatatccttgaggtgtggtgtcccaaataacctgggacataaactagcatagctggagcactaactttcaaaataaaattaatcaaggaataatagtcagctcttctaaaacaaatacatatataaacatatgcacatrtgctgtagcctcagaataccatttactctaagaatgtaagctatyctcctatgctcaaaataatgtaaatttaaggattgagaacttcagtggtaaactgtcacctgtatctctatggtttaaacaaataaagaaaagaataagaaaacatttgttactttacttttaattgaccttaactttctttttctctctttccaccttgctttcttgttttgagttacactttgggcccaccaaggagatttttccaccatgtgagttagctagccggtggtttaattctccatctgccagtggctaatatggtttatatgtggagggaaaagtggtgagagggagatttcaaaaaggaggcttttcacttagctaagacattatgtaatagaaaagatataaaggaattattcactggcttgctggtttaagaataattcaagtccctgcacagagcttcaaattaactcgtggaattatctttacctacagtcgtgttttagttgtttttcttctattgaagtcaaaagaaaaacacaaccttccattcaggaagaaagaataaattgctgttcttgttttctgtatcatttttggcactgttttttgacagcaattcatgggaataacatagatagcctttttatgcatgcgctagactcaatatcccactrtgggaaaaggctcaattcaaatttgatcacattgtgaaaatgaaaacttagtgtgggtgaatataactctataaaagctgarttctccctaggactctgtgtgtgccctgcattaactccaaaagtcagcagtattgtagagtcattaatcttagaggaagaaatataaaccaggtgggcaggctcctaacatcagctagaccagccccatggaaggatggttaattagctgcccgcagtgtctacaaacactgtgggccattaactttggcttctgtcaaattcagttccagaacaaaaaaatggctatktgtggcatgtcaggttttttggcatatttgtgttaccaacttataacattttaaagagaagaaaattctagatttctgaggacctgcagccatttattatgtatgacatccagcatgacacccacatgcctcgctcctataagattcaacacagaacattgtcaagggctcccactttcccaagttaggactcgttgcaaccatttcctcctaagctcctcctcctgagggccgtaacgattcactaaatgcccatcatggatcaggtagtttacaagcatgatttcaagtgattgttataaagaccctgtgaagaggggcccatcatcctgtttgtattgcatatgaggaaactgaagcagagaacatcacgcaaattgcccaagctcacagttagtaagcttaggcagccagatggccagactgtcttcccctcaatggaaacaattttaacaagcaattaatttaagaacatgttggaattaactcacaaacttacataagaaaagacaactgtatttggcctttatttcattaaaatctgaactcggccatccaaaactacctcgtggaacacacaaatgctgcacccagtgatcatgatactctctccaaaccaacacccgttggtctgggtgacwgtgcacacagccagctggactgttttgactgaatcgaccyaacacttaagcttattttttaatacattaaatttaatctaataaataattaggggaaaaaggagacgttcaactctgtttgattcaatgaattagctcttgaactaacctaaacggttgtttgaattgtttgacaagttcctttgtgtggtgagtgtgtctgtgtgttttcgtacaacttgcctgtcaatgcagtcaaaactgtgtgcaacatagacacagcttgcaaagtgttctgagaactgattactgtcagatttttttaatccattgagtcccagaggtgccatgtaaatagaaattttaattttatttattcatagactacatttttttccctttgtgccggaggatgtaccaaagcttcccaggaggatctttgttaatttagagcatttctgtctctgccctagcatggaaggttctatcgtgtatctgtcccagatcacaggacttgaagtacttttgcaacttacaatatcatgaaaaataaaacagttagggctaaaacaaaagagttcatctacagcagtggccctctatrtgtggtccgcaaccattggtggcagcatctcctgggagcttggcaaaaatgcacgttctcagcccacccaataccgactgaatcagaaactctggggtaggagtctagcaatctgtgttttaacaaatccttcagaggattctgatgttcactcaactttctgttcctctgyctaaaggaacagaaagaggagacacctcggtctttgacttgaagtgggtattgaacaagaggtctcaaagacttcctattttactttaattaacactatgatgtcttaaataaagttctgtgtctttttaattccctcttttaatctatggcaattcaagcaccaaatttaagtcaaacagacctggccaaaaaggcaatgccaggctgataaagggaatgactatagggtaatttaatcaattctagcagaatatctagaatccagaatggtcagtctagttacaccagttggctttacaaataaattggatcaataatgcagtgagctgattgtttgcttgagaattagctgaaaccaaaagcacttaaatccattgaatgtaaattattttatccaagtagcatagaaatgcccaagtggccttacaagattgaaagggttgtctcagccaaataaaacatgccttcagaacaaaggaatggcgtgtgtcagggaagactgtctaggatgtattgatggggaaactgacagagcttcccaggagggtatttgttagttatgagcatttctccttctgccctagcatggaaggttccatcgtgcatctgccccagatcatagctctaaagaagaaatacaaggcttacctctacatagatgaagctcacagtattggggccgtgggcccaaccggccggggtgtcacggagttctttggactagaccctcatgaagttgatgtgctcatgggcacattcaccaaaagttttggagcttcaggaggttacatagctggaaggaaggtaagagagggcctgcttgtgtctgtttaaaacctgagcgccctggggatgccgtgtgtagggcttctctgaatttcatgaaagcttcaattcagttcaccacacctcagctgatcactccagcctggctacagtgggttcacagccagataaggcccagaatatcgaggagctctccctcgaatagtgaagaggagcatgtgatgagtgatcacactataatgaaatggcaacactggccgtgtacataagatgcaaagtaccaggcagaggaataattaactctgttaagtagtatctaggacatggtttagaatgaatatccatctggtagacaaataatggggggccatatttaacacacagagagaataatgtataccaagccagaagtgataagggatgttctgaaaactataagcattaaaaaacacaaagaagataatagcaacagtaggcaatgttagttattagggaggctgaccctatgctacaagttgtgggttttaagagttttaatcaaaacggtggcaggaatgtacttttaagaaatattctctgcaaaaaaaattctttccataatgttgcatacaccataggtcaaatcctgccattctccaatatcttatcaatatgccttaaaaattctgatctgctgggattagactgttaagtgagtgttggccctgtcattctagtgccaatatcaccaagaggtttgtgraaaaaaaaaamaaaaaaaaacaataaatatttgagagaaatttaaaaggagggaaaggaaagggacaaagaaaatccaatattcaaacctgggtttgagagataaaggagccagttatctgaacaatgagaggatagccttgtccaaattctgacacctatctcagacaaacctacacctgtcccaaagagcagrtgtgacagtgatgttggctcagcctaggatgccacaccaggcccaaaaccagtgcatgcaagtggtatcaacaaaaatccccactttcttacctattgtgatgaacaggaacaagagttcagacttctggtaaaccagttagacaaaccaagaagtgcagcagaaaacagtcctctcattgaaagctcatgatttaaaacaacagatttaattctggccactggccctgccatgaaatgcacagatgcttaaaatgttcagagttttaagtggcctttacccttcaataagcactgctttctttcgggctcaaagcattgtttttcatcccctcttcactggcctgtgggaatcagctgggtaatgctaaaaccattgggaaagcccaggatcttacaaaattcagctaaatctggtgaaaggttaaatgttycctycctagactgtcgaagcagtaggagcagagggtctcaaatttaggagctccctgatcctggctacattgctctgwgagcttgtggttttgtgattactttagcagcagttctgaactacaaaatttttaacgaagcataactctacttcctgaaccaaaggcacctgaataaaccgaagcaagccaattcttgaaatgttgtcaaatttggtggatgtcayatttttccccctagagtagcttcatttgatacccactttaaacaaaggctcgcgactagcagaagtaaacaccagttcaccatgattctctctcatgctctccattctgatgtcagctagagtatttttaagatgtaggcgttcttgtccacacaatttctattcatttggcatagatactgagcaattgtgaaaattaccattatttacattaatcgggatgcagaaaaagtatgtacatctgttcattttcttatctcttaaaatgctcattttatgcatatttggatacagagggtcgcattgttcattccctctcctctccctcctttttcctccccacctttctctgtcttctcttcccttcatgttacacygcagtgtctaaatttaccactagatggcagcaagaattagagcgtgtctggcagagattcgttagcctacgctgagatctgccctaaaacagcaagatgcaaaaccttgaaaacataggrgctgtttccaagacctgggcggtgagcaggagggcatttgagaaaatgcctgtatccctgatgacttaaaaatcagtcagatacacacctgtgtggaatgattttggtcagactgtgataaacctgggtaaactggcttcctttcggcttaatgagcccatgatttgatggaacttatgtatcygttcctttgtacctttaattctttttaattatgttaagtttcattatgtataatttcaagtcaaacatatattttattcctatgaacttcagataattttgtgaagaatttttactttgagtctgtttaaattaggattcggcaaatactaaagatttttgtttgaaaaaactacttctactagtatgtttaaataattaagagtagagttttcaaactctgataactgtactgtaagacagatagataggtagatagatagttgatagacagatgaataatctcccagatacttcccgtatatctcaaattcggggattattgcaaaatagctaggattccaaaccaatgtatacaaaagcaacaaaattgaacataaaaaaagttaaagtacacacattcagacttgctgtttttctgaaactgtgtataatttcaatttcactgttctcatagggttctcagtaaaccctgaaatttgaaaataatcagttagctccaaaaatctagaaaaaagagataaaaacatctggctcttaactctctttttaagtgatgttaatattggtatagaggggctgcattcccagtaacagtgtctaggaggttctggaaatctttatggaatgggtcaaggtcagagttttatatattagcaaccagatgagacatgtaatgaaacacatttgaaaacaaggagaaaaaaatggtttagtatgacgatactactagaggaaacagaggttttgtttttatctcagagccttttcctcacaaagtgtcctacaaattcccctctgctaattggaagttgctgccaggctgtgatccccactttccacctcaaggaaactgctaacagtctgtccagagccagcagagttttgctgttttgctcactttgggtttggagccgctatagatgcacagtgaacagcctaacatggaggagtctgtcctttcaagaccttcctgatgaaattccagatcactacttctctccacctgtcagagctccgtgccatgaatggcttctttgaaggaaagcctaagctgatgggactaggtttcttatttttattctttcacatttgtattgatcctgttgctgggaaatgtggtcaatgccgaagaccccaaacttttccccaggcaaggatcttgagtccacctgcatgcctggtgccgaacactggctcccacagcctccacaggctgaccagagacttgcaaatgaatgaagcgatggtagcccttgtaactgataggttgcagggctggaattctggagaagggaactgggacagggcagacaaatttggggtgagcattagccccagaagcctgcatgccagccaaagccaggtcactctaaaaagtgagctctgccctgcacgctaggccctggctgtatttaacatccctttgaagtaagcaggggtcagggagtgagctctaagatgtttattctaagagtctcctgtctgatttcctcccaaaaggccacccttgcccttgaacttcaggcctgtgtgtagagaaaacaatcagggttttgaacttccaaatggacgtggaaacctcgatacgaggagacctctaacccatcctgaagaagacacgacccagactcgccttgcaaaagaccaaagccacctcttaactcatggctcatagcacccaatgggggaacgagagggggaatcagtagccaggaatcaaggctctccctgacactctccagaagttactcaaagagctccattttttgaaccacacaagcaaataaacttccatccagaaactcagaccctgagagaaagcaaactcagtccaaaaaaaataaaattttgggcaagatagtcttaacattaaaaagaaccagtgctgcaccgatgaggtatttattcaaactaagaaggctcatgaccttgactttaaaaaatgtctcaatctgtgaattagggttggggacattgggaagagcccttttcaagatcaaaggaagttttgttttacttccttgtctgatctttgtcagtgatggcccccaagctaagagacaattgctacacttgtccctgagaatgcagttgagtaataccctatatgctttgaggcccctggccacctttcctccatctctaaaacccgtctgttttccattagacggtcaatatttagcaggccaccactaggtatccaccactatggattttaaaagaagtgtaaagctccatccctgctctcaaggaagtttcagtcccttttggagaaacaagagagatagacatgaaacatttggagaccaatgtgactcaatctgtgacttagtaccatatagatgagtagatcaggaactccccacctgctccaaaaagaggaacagtctctgggttagggaaagtaccgcagggtaaggagagtggaattggggtctgtgttctcctggaccccctaacaccacaccaagcttactcttctggggagaagtctggagaagtcgagtgtggcctaagggtggggctcyacagccagcttctttaggtccaaatccttgttctaccaccttttgggaataattgtgtaaacttttctgtgattcagttgttctgtctataaaatgggaattaaaacagtacctaccttaaagagttattgtgaaatttaaatgtattaatgcatacaaagttcttaaaatggaacctcaggccaccagggaatatcagctatgctgttagcttctagccttattatctcttcagggtcattcaacctgtcatcaagcctgggtactcccttattgaaaatgtctctcttttcctttcttttcactcctactgccacccctccccataaggatggaggaagagttaggctgaaaatccttggtttgatgtatgggtctaccaatgcgtagtcacacaaccttagaatgtaaccctgtgcaaaatgagagagttgaaacagagacactccaagaagcttttatattttggtcccttcctcccgccccatgctcccagttctaagaatytttcaattggccattgattaacaatactcggccaggcgtggtggctcatgcctgtaatcacagcactttgggaggccaaggccrgcggattaccagaggtcaggagttcgagaccagcctggccaacatggtgaaaccccatctctactaaaaatacaaaaattagccaggagtggtggcacacgcctgtattcccagctactcgggaggctgaagcaggagaattgctggagcccaggagaygaaggttgcagtgagccaaggtcatgccactgcactccagcctggccgacagagcaagactctgtctaaaaaaaaaaaaagtcaccaactgcatcaggtattcactgtttcactgtgtaccagatgcttttctaagcatcccatatatgtattcacccatttcatcctcataaactccgaggtaagtattactatgatctaatttttcagagaagccaactaaggcacagagagatttagtaactggcccatggtcacacggcagtaagtggcaaagccaggatttgaatctaagctattgggcatcagaggctgcactgtaactcctgcgttatattccctccaaggggacagttcctcatccccttgtctcagaagcactggcttctccctctcttcccaattgacacctccattctatgcccataagatgccatccttattcctaattttaggacaggcccatgcctttttgctcctctgcatctatccaaatctccccatccctcatggccagatcacacccttgaaacaccttgttcctgacacaggtccacgtaagcctccatcatccaattcccaggacccacccacccactcctcattggcttccccagcatcctgtagggagatattcactctcaatagagaaaggcaatccctgctgctgctcctcaggagcacggaacatgccactgtgaaggacagccctggctgtggctactctggcaaatgactgctgctgtctctttgaggcrcctcagatactccaaagtgaactttccggataccctgtggctgatgaattcagtcaggccagcatcatgcacatactcttcagatatggggaaaacccacccagcttttttcatgaggctcaccaaataaaagaatcatcagaaacttaatttcatttatataaatggataatggatgccagggactagccttatggtccctttctatcctccctcccctcctggactcccacacatgtctaggacagagaaggttattggtatatacttgctggaaggaaagatggaaggggggagggggagaagaaaagaggaaagaaggaaggaagggaggaagggaagaagggagggaggaaggaaggaaggaaatactttgaaatacagagaagaaacagatttaaataaagaatttgaaatgaaaagagagagaactagagtagaagggaaggggaaggaaggaagctagaaggaaaggaagaaacaaaaaaacaaagggaatagtttgaagtgaaggagaagatggaaaaaggaagtcatagaagaaggacgggtgaaagggggggattcagaatgaaagacatattgaagacagcaggaagaacagaacacatcccttggttcccctcatggaccaggcagagtcatcacatcattaatctaaccttcaccgaccactgtaaggcaggccacacactgtgctgaggaagagaaactgtgaatgttgaaaatgcttgtgagcaacaatgcccacacatacctaagagagatagaaaagtgatgggcagggaycaggcccaggctcggaaktgggaatgaatgtgactaatgaaggagggtgaggaggacatgaacctaccccaaagcagaggatctcgattcccaagagctctttccaaatcaccttcatgaggaaggaagacatagcgaagacacctgcctaagtgggattctgagctgtgccgttattctaaagagaaggcatctgatcctttaaagaccccactgctaatgcagaggcctgtcatcagcccattagcttttctgcaggacacttggagagtcccaggccatgagacactgtataggtgggctgatggagggtctctgccacccaactgagcacctgcagatgccagctctgaggccctcaccactgcggcattagattactggagcttcttagggctttcagcaagcttacttgggaccttatatttggcctcaggagtcaggcatacaggtgaaaaatggctcctaccactgaaaaccagcattctggagtggctcagcattccaaagagtgttacacaaaacacaaaattccaatagttctctgctgccaaaggcataaccagagtttatctggtcctaatattctggtttaatttcccacaagcctctactcaaactgtcctttgctgtcctccaaacatgctgcctccattcgtttttgctgtgtaacaaaccacccccaaatttggtgtctaaaaacaccaccatttatttagcttaaaactctgcccatcaacaatgtgggctgggctcagctaaggagttcttttggtctcatctgggcttgcttctgtacaacagtccattgttgagtcagcagggcactgcttggcctggggtagcttcagctggaatggtccttctctgttccacatggttgtcatcctccagcaagctagctcaggcttattcacatagcagctggagagagttctgagaggacaaaagcactcaaggcattttgaggcatagacccagaaccaccacaccatcacctctgccatataytactgaacaaagaaaatcacaaggccagcccagattaatccgccttttgatggaagcaactgcgaagttggattgcaaagatgcatgggtacagacagtgagagaattacagctatttttgtaaacactgctatacatgccttctgctttcttgcttctgttcctttgttcaacttctctcttctgccaccctccctccacgttttcttttcccccttaattatcttcattcttcaaggcctaatcatatctcctcaytggaaccttctctaactacttcagctagaaggaccctctctctttcctctgcatcttgcaggcctgttgcatgtcctagtttgcatggactgtgacttattctaccatgcttgttcatgggcacaatcatatgtaatattctcaagggcaaggaccacatcctgtattctttgggcactgaacacaaagtcagtgctcacacatagtaggtactcaacaaatgcttcaggaatcattttttcttcacacatctggttttgccttaaagttcaactccaaacctgcagcatcctgctttgctgtagattctaggtttttgagggagagactatgaaggaaatagaaaaaataaatagtttgatgaaaaccattgaaagttggaccccattcatcttttgagcatgagatcaaatgtcttttgctatgaggatagggatgggactagatgtaattcccaccaccagtgttgagatttatttgccttctttttgggtttcccctctttatttaaggacctcgtggattatttacgggttcactcgcatagtgctgtttatgcttcatccatgagcccaccgatagcagagcaaatcatcagatcactaaaacttatcatgggactggatgggaccactcaaggtaagaggatctgcagagagcacagctcctggacctctctgtctcccttctgcctcattaatctccccgcttctcaaatacacacctttatcttatagaaccctatttgtaaatcaagccatgtgataaatgcacaaaactgccgttagcacaccatacaaaaaccctttgttaaagcaaagaaaactttctaatttacctcattgtgaacagcaaatttcgataattttgtgtgatcaattctgttgaaattaagcaaatattgtttgtgtgcgtgtgtgtgcgcgcacgtgagcgtgcacatgtttgcctgtgcttgcttggggctgtcacttgtgtttccctaagaccaaagtagccaatttaatatccaatttttcaatccttttattttttatagccagaggttggacagtggaaggccaccactggccattgaggatatatagacaaaacacacacaataagcttccagccatttctttgtcagtgggaccagagctaaactgtgctactttgctcaacccaaattaatcctctttttgaaaaattgtttcataaaagcctcttggaactctccctccatcttgcagagatggtttatasagattctaccacatgtcacacaccagaggggatacggtgctgaataaggcagttcttgctgccaggcaaactggtgagcacatttatggaagtagcaatttatcctggccactggactgtacaatctatgtgcctcaccccacctcccagctgacctgaagtcctacattgtttaatgcaatgcttcaagcctgctatttcagtagaagtatggggtactccatcagttttcaatattattaaagcagcagaatattcacatacaaattttgctagaagcctactatataaaacagataagaacaaggctgatctagttaaagtagtgtcttcacttacccccatactgataccccctggggcccttctactgagccctagtgctccccaagacacttgtttgaaagacaagactttttctttttcactaaagcagggtaaaggcctgcaggaggatattttttcctccatatgaaatgcggtgattggctgatctctaggatcccttccaggcttgccttttcggtgttatgactctgcatcctattggttggtctttgtgaaaagaaaacgacagtccagtctaggaagcccttatggtatgagactgaaggtagctgcctgaatctgctcctgtgatactattcactcgtatgtggccttagatgagtgacttatctattcaaccctgagcaagttactcaacttctctgtacttcaattcatccagttatgaagtgagaaaaacaatatttatgagccaaggtttttgtgagaagtaggcaaattaatctgtacaaaatatttaacattgtgtctggagacaagtatcagtaagcattgtataattgcttgctactattatttgctgttgtttctgaggtgatcgacaagtatttgaagcatttctcagagatgctgtaggaagcatccttatgacagaagtgaagtaggactagatgtcctctaagatcctggattagtcaggataagggaggttttgccaccataacaaataaaccctgtagatctcagtggcttaacagaaccaaggtatttcttgtttgcatcacatctaataccaatcagtcaactctctacacagtgcttgtccttgaagacagtgactcaggctgctttcaccttaagggttcatcatctcaacacatggcccccatggttaccaaggtaaaaagaaagagagggtcagcctagaggtgactcttatcaccttgcttacaattattggctaaaactagtcatatggccacacccctgaaaagaggtaggggtaaattaagggatacagacattggataaacaggtaccttttattttggagggggaggaggttcttttttgttttttgggtttttttaaaatttgagacagagtcttgctctgtcacccaggctgaagggcagtgacatgatcttggctcactacaacctccacctcccagactcaagtgattctcctgccttagcctcctgagtagtcaggactacaggtgtgcaccaacaggcatgcaccaccatgcccagctaatttttttttttttttttttttggagacagagtttcgctcttgtcacccaagctggagtacaatggtgcgatctcagctcactgcaacctccgcctcctgggttcaagcaatactcctgcctcagcctcccgagtagctgggattacaggtgtcccccaccatgcctggctatttttgtatttttagtagagatggggtctcgccagattggtctcaaactcctgacctcgggtgatctgcctgcctcggcctcccaaagcactgggattacaggcacgagccaccacacctggccaatttttgtatttgtagtcgagacggggtttcaccacrttggccatgctggtcgggaacacctggcctcaagtgatttgcccaccccaggctcctaaagtgctgggattacaggcgtgagccactgtgcctgtcttaaacaggtatcttttaaccttttaacattgaagcgagatagagtggcatcttttcctccacaagctttctgctgtatgaaaaactgttctggaactactggcttcccacaaagccatattaattctcttcttaaacttcaagtgtttcttaatggaaaatcaattatttgagatttaagcaaaaatgcaagttaactgaattgtctcagaatgactagaattattctttggtcttgttttaaagacaagtgactaggaaaaagttattctagaaattagcttgtgtctcaacaaaaattttcactcatttccggagtcctttggtctatatgtcatccgaatcagttgctttacatgtatgcaactttgcaatcatgtccttccctcctccgattggttcatcacagacaaaacttgctctattgatctgatcacagtggaagatctgcagaaagattacattaaagacatgagcatttgctcctcagtaatcatctgccatcaatttttcttcccctgaggtagtagatatttcccttgcttctctctcttagccttatacctaaagaattctttggttacttttttaacctcagttttaaagcttctcactttactcctcttgtcatcttaagagagaaaaaaaaaacagagaatgctatgtgtatggtctggtttttttagaggcaaaataggagaatgagggagaaatataggacagtttattttcaaagaaacaaaggaaagtagaagaaaaagaaaattgacagaattatcagccaagtttcaggtagttctgcctgacacatcttttgaagcagtgraagtcatacagtgaatgatcacactggcctcatttgcaacaatggctgctttaaatcaaatgagcaggacaggttaggaatattgcattagctcacccctttctgcagagatagactcactctcagggtaaagttgcccagagctcaaaggatgcactgtttcatgcaagagctgccttacaggatctgagaaagagaagccgggctctgagccttcatcttcagcccactccactacaactgtgattggagcctttcaaggctttgtttcaggttgagtttggggagcagttggccagatctgttccttgatgaatgtcttcactttaatctgcaatgcaaagccatacgcttcaaagaaaggcaagctacaggaataaggtcagtgttcctttgatgccaaggttcaaagatgaaatagcagtcccagtgaaatgacaatgtttatgcacaaacagccaccttcactctgcagccaggctgcttgtggagttaatgcacacaggctgaggggctgcaggccgtgcatgcattccatatgcaccaagayccttttaatctcctggtctgtcactctgaggagtgcagtgagcccaaaagtggagatttgatttctccatcctaatggatgctgggtggtcttccagccaagccaatgttgtaagccccttaagggcaagaaatgtgtcttgaattattctggtgttcctctgagtgtcaaactcagtgctcagcttaataaatatgtcatgactcaacttccctcttgccagcctgctccatttcaggccaatgtttatgctaaataagatcatgaggatgtttatctcataggactgggagctgggaattggttccacaccagttgtggcagcggaagggatcactcagtgattgaagttacttttggaaaggtctagaaagatcgcagctcagtcgttttcttatctagacatagcacacatagcctcaggaaggtgagccccaaaccacaccgactcccctgagaaagcattgtcaaaaatcatcttattactcatgtttaaatcttcgatgtatatttttcaagtaatcaatcaacattttttgaactcccagtcttgatcttaccttactacaccttctttccccaactctgggtaaaattccatttctcagagaagatagagtttgtatgatgtggctaattcacagtgtgctctgcagtggtgcccggcctgacatctgctccatgaatggcaagtcactttccctctcttggccttagttccttcattgcaaattaaaggttgtcagaagaattaagtgatgtgatacagataaggaacttagcatgatgcttgatacacactaaacactcaataaagtcatagtactttcaacacatctgctttattcccttacttctgcaaattttccaatagctttacccaccctggagttctccctttttccccaaactcacatcttcctactctattagcaactcccacacactctacttgacatatattcagaatcaggtcacttctcacacagccaacactctctctatcacctctcacctggattcctggagtagcctcctgaatattctccccacttttgctcttgcctttttatggcttcttctccatgcagaagccaaaattatcttttttaaaaaggagaagaaaaactaactcataccatgtcacttccccactgagaactttctgtcgtcttttcagcttactcagcagagtccagactgtggtcttcacagcttctcaggatgtggtcctccatataccctgccacccctcccctcgctcagcctactacaggcagctggcatccttgcttttcctaaaacacagagagcagctcccacagaagggtctttgcacttgctggtccctctaaaactgctcttctgacctatcggcatagcccactccctccctgccatcccctttctgctgaaaatctgccttattagggaattggccctatcctaaatagcaaatcctcctgtccctctaattctcctcaccttgctttaatttttttttttttttttttttttgacatggagtctcactctgtcacccaggctggagtgcagtggtgccatctcggctcactgcaacctccacctctcgggctcaagtgactcttgtgcctcagcctcctgagtagctgggactacaggaacccaccgccacgcccagctaatttttgtatttttagtagagacagggtttcaccatgttggccgggctgatcttgagctcccgacctcaagtagtccacccacctcggcctcccaaagtactgggattacaggcgtgaggaccgcacccagccgctttaatctttacagcatttatgaatacctgagaaattgtatatgtatctgcttattatctgtttgccctcactaaaaggtaaactccaggagaacaagcactttgcctattttatttattacactgaaaacagtgtctggcaagtataggtttccaaaaatatttattgaaagaattcttctcgctatccctcttacctcagcaaataaacagctctgatctcttttacatctctgtgcttgattctttccctttccatcttctaaagacaccagcctcttttcacaaacttgcacttgttggtttctctcatcctaaaaagactttccttgccccttctttttccaacagccaccgagcctcaacccatccattgcagcagatctcaaaagagtgagctattccgctggcttcccatctacccttctcatgaagtttccagcccctgcagcctgtcccccgcctgtcctctgcctccttgctccatggatcctgctccctctaaagccactcctgtaagcacactcccctgcttctctgccagattaaacttgatctctctgcatcattctctctctttgaaaacagccttcaaagactgtcttcgttgtagagatgctcttctcttctggtttttctcttatttttctatttgttcttcctctcttttctgccaggcctctttccctatcactatttgccctaatcccacactctgttctttttatagttcccgctgcacaagtaccctcacctgtttcctttccaaaacagcttgcggaccctctacccccagagatttctgcatgacatgcttgctgcattctaacaagccccaggtgctgctgctagtccagggaccagcctttgagaatcactgctgcataatgaccctgtagtcactctttccctcccatcagacattaatggcttgtggatttcttgtagatagaaaccattaaatctccataacaggtcgggcatggtggctcacacctgtaatcccagcactttgggaggctgtggtgagtggatcacttgaggtcaggagttcgagaccaacctggccaacaaggcaaaaccccgtctctactaaaaatacaaaaattagctgggcatggtggcacaaacctgtaatcccagctactctggagactgaggcaagagaatcgcttgagcccaggaggcggaggctgcagtgagctgagttaaggggtagcaccagagctgagaggccaaagaagagaccctgagccagcagacgagatatggggtttatttaggggaacttacgtacagggatggtccagtgattgtaggctggacaggagaactgccaccacttgtaaaaagcatgtagttcatgtagcattttcacttaacatcctttccctaacaacccccacctggcaacctttattcaacctttactcagcctttattcaaagggcctcaatcccctgtatgacaagcatcccactggacaagctgggtactcagatgttcctcataggtaaggaatgaatctccaggttggccacgctcaaactgtgaacacacattcaggtgtgtctgccatacagggtcattctcaggaaatgcttaaactgtcacggtcaggtgtacgtaccatgcacaggtgcagctaccatataacaatccacacagttcctgacacatcataggccttcaatacatactttccagttgaattggaaagaaatgtgttaagtctcagttatgtcgtgatgcagatgctcacaaaatatctgtttagggccatcttttcatcaaaagaattgtatctccgaatacttaacatcagcaatctgagtaaataaacttgctcatcaaggacaacttctttcttataattcttgtctgcaggcatgtctaattttactcattatgcctatctgcttatgatagagtcactgatgttggggaaagttcccccgcatgtccccagtcatcatttcatatttcatgatgatgggagtgccagacagaagggagagagtgattacaaggtcatcatacagcagtggttctcaaagagtggtccctggaccaccagcagcaatgttacctggggcttgttagaactgcaacaaagcatttctgaatcagctgttttaaccattcctccaggagattctggtgcaggctcaaatttgataaccatgtttctacgtaacagaaaagaaacagatctgtgcagtgggagaagtaaagtgaacagaggatggaattctggcagatgcaaacaaaggtaaaggacctagcaaaaaaaaagaaaaaaggaggaagaagagcaggcagaagaataagaaaaagcccgaaagagaaaagcatgaaatgtgtttggatccatttctttaaatctgtgtttaaaccaaaacatcaacgctgccctctcagttactactagcaccttgcctgtccttcagtccccatgaccactttggcatcaggaataggaaagggagttttgcttatgaaatgcatgtgcctcacaacagtcactccctaagcctgtgctttcacataactttttgaagtatgtaaagtcattaagagttcatggtcacaacattcattttattgtttgatttgatagtagacatctgacagagatactgccatttctccaataactgctatcccttaggataaatagggtagcatttataataattatttaaattgtctcttcagtgtatcttcaatgggtaggatcaatttgatgaaaggaaatccacaatgggcaacactgctaggtgttgatttatcataggatgactcatgacaaaatattccatattcctaactcagaaagaatggtctctcctataattatgtgggatctacttaactcatgctataacagtcaccctccatttgactgctgatcttcctcccatgatcgttacaattttgatgacatggtgttgaaatgaaattggcacttttttgaaaaaagatgatctgcttaacctgatgcatctagtgaatattagatattaagattcttgttatattttcaatttcatgtcagctgtttcatgaaacagcaactatatatcttaccaagcacttactttgcctactggctactgtgtagtttttagatctacgggcccacttatctgaagatctaaacgtttaaatattttagaatttttgtgtaacattaagtctttcaaaatacaacacttaaccagagacaggaaagttggaacgattctagctatatgaacaggccagtacttaaatttggattactccattgacgagttcatttctaatttcaccaaaatggctataagaaaaatcataatgtctctgacttaatcaattctctctcagctattacctcagtgccaggctggtgggataatcaccaactttctgaatcacaaaaccacattttgtatcacatggatgaaaacgtgattcatttataatcaagtgaccagtaatgtcggaaagggaaacagtaatggaaatttacttacaagagaaaaggtatacagaatttcaattactaatgtgtaatatctgatttcagtagaatacacctgcatcattgttaataacacctaaacttaaatgataaatttaggaaaaatgaaattctctatttttcttcaaagtcacacatgtccctctctgcccttaaactgaaggagtttctgggtggtaaggcaggggaggggacaatgtgtctggaagaaaaggaaggagaaaactaaagataaaattaagatggaataatgacttgtgttcttcctggaaaacaatagctatttaagatcctcagaaatagaggaatttggccaggtgtggtggctcacacctgtaattccagcactttgcgaggccaaggcaggtggatcacccgagctcagaaattcgagaccagcctgggcaacatggcaaaaccctgtctctaccaaaacatacaaaaaaattagatggcggtggtggcagacacctgtggtcccagctactcgggaggaagtggtgggaggatcacttgaccctaggaggcagaagttgcagtgagattaaatcgaaccactgcactccagcctgggcaacagagtgagacctcatctaaaaacatatatatatatrtaatatacatgtaaaaattatatacatgtatatataaataaaagttatatattatatacttatatagtatataaataaaagttatatatatttatatataatatataaataaaagttatatatataatatatagggagagaggaatttggcaggaagaaataacaatgcaatattttctctttttaatgttatgttttctcaatatagtattcagggattattgctgcaaaaaaggtcataaatagttactctgttactattatccttctttaattatcttagatattatcaattaaacagatactatccagataactacttcaattctctactttccataggaagaaaaagcttaacaagcctatcatagaatggaaatccaggttttgatgagcttttttaagaaagccaataagagaaggatggggaaattgagtctgcaaattagagctaagtcccccaatcattgtgctggtacaagtagttcctcttcaatctgggcttcctttaccctttaaaaactaattgctatcagaccaagacctgaggaggaaatattcaatagaaatgctccctagcagagggcctcctcacaataaatctttctgaggttttagttcttggatgagttgggaagtactcaaagctttccatctgtggggaagttgttgccttggctgtagaattctacttgcacgttacacactgcctttagcagggttggggaatgaaggctttcagctaatgggatgctcctcttttcctttgggttttggcctctgggagaaggctctccattcttgaactgcagaagtgatggattttttattcatatttggttaaattatggtgttataatatatatattaatatatttggctatatagtgttatattttatgatgatattccctattctaaaattaaaactgagtgttctgttccttcattgtgaagtccctgtttctgctgagaacatcagagaggctaaagatgacaatttggtttctatgccctgggaaagaaagcatatattctgttcattgaagtagttcagatcatgtttaaaaacatagataagtaaacagctgttgctgattaaattgttcttatcctcacaaacgaagggaatctctctacaaaattaaagaaagcaatccaggccttccgtgatttcccagagacttgcagactgggcaacagctaatcctctcatatttccctcatatttgccccttcaccacacagaccttcctggctcctgactccaaacataggtccccctgagctttctgctactcaagctcatctcccagaacaggtgcagagccaaaacttgagacaaaggaaatctggactcagaacagcttggggattcaggctggagtgacccttctagttcttgccaccaacccagggagaccttccctaaacatcctttctaaaatattgtcccctttcctgtgagttactcagtccacccccacagtcagtatcattttcttcatagcacttattacctccttgaatatgaattttctttctgggttgatacctgtttttgccaggagaatacaagtgccatgagggcagagacactgtccccaaactgaagtagtacatgttggctgaataaatgacccattcagcatcagctttggccacatctcctcaactattctgcaggcagcttttcctctatctggaaggctctcatccctccccacaatacactacccccattcattatctcctgagcccctggccatccttctaagccctatcttgatggccccagtcagaaaattattcttccttccttcagtcccttgcggtttttacttctattatgttagtcacacacacccctaacccagccctccaaataggtagtgattagttatttaattgcaccttaagcatcaaatacgtgagtgaatgggcaccgaacactatacttgggactaagcagattttctgacaagcttgggatctagtcaccatttataaacaattagaatgttatttctttggaggttacttatagaattattttagttcaaatactgctgtcataactacttcatggatgggtgcatgcataggtcaaactctatagcctctttcccattcttttgataaatgcatggttttatataacatacactagggatttgtctagacaccatcagatatggaggtgagctgagcatgctggataattcaagccaatgctacttaaatagcagaagcaaaaatggagtttttcctttaattatcaagcagttagttgaatctctcacttaaagtttcctataggagacacaatctgaaactcaaaagtgtatttgactttttcatacacagtaatcagcaggcactgggcaacagctaatcctctctatccaagttgagtacatttctaaaatagaggagggtagcgtgattcttaagcatccaaaatgacattttccatcctccctccttctcctcctccatcttaataatgatttgcacttaggatgtttttcaatcaagaaactatgtttttgtgacattacttggtgactagtaacaagaggttgagaaactaaaactcccacagaaaaatttgggtttctttttacagacaatgaaagataaaggggtattgggattttgagtctttgaaaattttccatagtatccttctttgtggggttggtattagttaagttatgttacttgttgtaacagacaaatgccaacaaaactgtggcttaacacaatagaaattcattttttcctaacataaagtccaaaattggtgtttctgttgggcaagacagttctcttccaagaacccagcctccttccattttgtagctcctccagcttcaatgtacggtttccaaagttgctgacaaaggggtaagaagcatgaaggattgtgcctttttcaggcacattttcaagggccatggctggaaaggcacattgcatttctgcccacattccattgtttgtaactcagtcacatgactttgcctaaccacaaaggaacctgggtaatggagttaactatgtgcctaggagaggaaatgagtttggtgagtaagaaccagactttgccacagtacttaacctccacccaggacattctttcctccgactttctgattctttccaaatgctctcctattttcttcataaataaactcttgacccggaatagaataaaagtatctaagaacaaaagaaaaataaagtctaaaggactgaatatggatctctcctccttttttagggactctcgggtctactagtctggcttttaccacaactacttctagtttctttttcacagaactcattcctagcacatggcaggtgttgctatcattgctgtgattctgttgctcagttcccaaagctgtgtactttctggaagcagaaaatagaccctgaagataataattcctcagaagaaattaaaatgacataaaattggagtagctctggaagtcatgccagaggaggggagaatgtatattttggaaatagtagcatacagacattaaggactttttttctttgaagaggggatgtgatgagacagaaaatggcatcattatcagaaaattaaaaattgcaatttaaaaacatgaactgattaggctaattctttgaaytgaatgagtttgagtgcaccccagtcactcactcagctctccttgggtacttttgggaccatagacgaaaaggaagctaataaatttgaacaggcagcaaacctctgatgttcatcacattggcacccagcccttgagtaactaaggtaaccaggcacgagactgaattctgagcccaggtagagaaataaaactagagacttcctatcaggatggagctaatattagaatatgattccgattaacatcacttgcattttatctacttttgaaagccctaaaatctgtttgcttctgttatgtctagatgggcaagttcacaccagataattcattctacagcatatctacaggattaaaaaaacagctctaaagcttaaatttctattttttattcagttattaggagaaaaaagttgattaaaatgtcaaggtcttttaagtaactattaatttttgaatttcaatcatttttatttaccttctgcagagaaaagataaaggaaaaaagagtgacacttataatgtatgtgcactgaaaatacaaccatgcctctttgttaaatcactttgtgcgaattatttcatttactctgattatttgtgaaattttatcatgagattgccaggtgaggtactgaccctgcctctaacccaatgtggactgggagaaagtggcaccagccccttccagctgtgacctacaacctttgctctggtccctgcaacaaggcacacatatttttacacttgagtttgataggtttaaaaaaaacagggactaagtgggaagatttagggcattgaggggggaaagaaaggagtacactgggtgatagaaattagctcttaagagaggaattttctctttcctactgtttatttttgacatgagatacattcacaaacttctctcataagacattgattgtcttcagtgcaaactgttgggagctgcaagctacactatccattcacatcctcaaacttatcttgtggctgttattgcagatttactcctcactcaaattctgtctcttctctagggaagagggaatgaaaagcaaagaggaaaaggactgtggtgcgggtgataaaaccatgataattcacacttggtttaaaaaaaatcttctcacatttctcagtgtctaccttggaagagtgttcactgaatacaaaactggtttcctacagccttttttctctccatccaactcagccaggacatggtgtttgctccatttttctaaggtccctcaatgaaaacaagaggcatctacaaaaaattccgcccaaaatgtactgtctgagggccccggcattcaaggcccttggcattgttgacagaggagctagcttctgatttctaaatacatttgccacttggttgccagctggagagaccgaaagaggctgagggcatggagagctgcattttctaaatggtttcaggcccctggcatttcagcaatagstaatacaaaacagatgttggtgctatgctccactggctttcaactgagggcctgcctcagtccatgattaatcacctgtgctggggggcaaaaaagttctacctggtctttttgtgtgtgtggacctaaggtcagggttagcaatcaaggtgacagacattgcctctctgccttgctgttgctgcttacctacatgtgtgacaacttgggtttgtccaataaatgcaaaattagccaacaaactgaactctagttaagagggaaagtttgcctggttgtgcagaaatagctagcaaactgttccagaaccttctgccccttcatttactttatccaaagagttagccaagggtagacttttatgaaagctcagtaaattctgcagttgatttgagtctttaaaaaatttccctagaaagaatgtaaagagaatctgtgtgtcttttagatggcactggggcaaaagatagtgcagccacttccttccagccgtcccacaaacargatatccttttacatgagccctactggagcatcctcttcacatttgcttcctctgtgtggttggaccctgagatgggggagtggtgatgtaatacatatggaattccatgttggttcagtacaagtgggaaaggaaagaacattattccatctgtagcatcttccagggtaaaggggaactggtattccacactggcctttgtttttccttcctacagctggggaggattaggcaggtggatttgtgcctgaggaatcccagtgtgtgggtctgggctagagagattgtatttgctttctatttctacattacgaattaccacaaacttagtgaccattgaatatatcagtttccttgggtcaggagtctgggcacagtgtattctctgctcaggttctcataatgctgaaatcaaggtgtcagcagctgctgttttatctggagctcaggcacctcctccaagctcacatggctgtgccagaatccagtcttttggggctgtaggactgagatcccatttcctctctggctgtcaatgggaacactctcagcttctggtggctgtttccgtctcatgagggcccctccatcttcaaagccagcaacggagagtctccctcacatcaaataccccgcctctctctctctctttgaatctcttttaaaacttcagagatgttcacctgtagctaagacctaatcagggctctcttaattaggacttcattactggtgaacatctctgaagttttgtgccctttgtaaaataggaggactttatgtagttaaattctctgtgatcatctgcttcaacttgagcactgagaatgaaattattctgataaacatgtaattcttaaaaataggaatatatggaggacatgtcttgggcaccaaaaagaccaagaaggagaccgggatggccaggttggctgtaggtgccgcaggtcagttatgtagacaagagggacccagttttagagagcaaatccaagtcagtgagtccagtctttggttcaaattaatagttttcaatatttgtgaaccatagaatttttcaaataaatgtgtatgaaagtatatatatatattctgtagcactcaagttatgtcagacaccctactaactgcttaatatttaatcctcataacagtatgcagtgggcattattattattatccttgtcatgattcccattttacaatgaagaatccaggtctcagaaagaggaagtaccttgcccaagatggtagagtttactttgaacccagcaaattggcttcatactgtttgagtgcttggctgaraagtcattgtcctgggcacaaggcaaaagtctggggggcttccccatcaatttttccccataccctcctccctgaggcctgttcagtgcatcctaccctagcaaagctctggaaaccaaaaggttttaattctgcaggcagctgccttggatggggcttcctggtggccaccttcatttgcacggtttctcagagccctttcaaggaaccacattaacacaattactcagcctagtatctgtcttttgccaattcctttgtcttcttgccacaaattggaacagttgtcgacacagctcctcgcccatttcagacatttgctgccaccttggcttcctgactagtcttgctacctccagcttttccctcatcctgatccatgcactatacactatgagctttgtcttcctaaccccctcagagcatgtcatgtttacttacaatgcttccagggctctctaatacccatcaaaaaattgtgactctcaaggtggcatttttagcttatgatgatctaactctactgatctttcccatgactggaatccaaacattctaggcaagtactcatccctttcctccccatccccaaacttgtgtccacaagatgttaagttaccatctctaggtctccttcaaactctcagagcacttcttttattgggcacttgattttctatcttgttgtgattaatttttctagtttataagacccttgaaaatagtggacacactgatattttaatcttccactgaacacaacagccacttacaaataataggtactaagtaagtagatgctgaatcaatcatcctcccagaagtcctgagaaatagatgtagtagctattactatcatccccatttaacagatcagtaaattgaggctcagagatgatgagtgacttgctcatctctatagatatagaggcagatagaacctaacgcacaaatctattgactgaggacaaaaatttcttgaggctgaattattctctggtgtcttcagttattatcaatcattatttttagagaatcaacaaacackatataatttgttactttcagcagtggttcttaactggaggtacacaccacagttacccagtgagtttttctgaaaggtccaacctagtccttctggagcagaatgtctgcagagggaggtctactatgtgtgtgtgtgtatatatatatacacagatttttttgagacggagtctcgctctgtcgcccaggctggagtgcagtggcgcaatcttggytcactgcaagctccgcctcccaggttcacaccattctcctgcctcagcctcccaagtagctgggactacaggcacccgccaccacgcccagctaatttttttgtatttttagtagacacagggtttcaccatgttagccaggatggtcttgagctcctgaccttgtgatccacctgcctcagcctcccaaagtgctgggattacaggygtgagccaccgcacctggcctactatgtgtattcttgaaaaaaaaattctagaaaccctgatgtgtttctctggttaagaatcactgattttgaggcaagagaaagaaataaagggcacccaaataggaagagaggaagtcaaactatctctgcagacaacatgattatatatatctagaaaaccccatagtactggccccaaagcccctcagctgataaacgacttcagcaaagttgcaggaaacaaaatcaatgtactaaaatcactagcatttctatacaccaacaacagcaaaactgagagccaaattagaaaagaatcccattcacaattgccacaaaaagaataaaataccttggaatagagctaaccagagaggtgaaagatctctacaatgaaaattacaaaacactgttcaaagaaaccagagaagacacaaacaaatggaaaaatattccatgttcatggataggaagaatcaacatcattaaaatggctatactgcccaaagcaatttacagattcagttctatgcccatcaaactaccaatgacattctttacaaaactagaaaaaaaaagattttaaaattcatatggaaccaaaaaagagcacaaatagccaaggcaatcctaagtaaaaagaacaaagctggaggcatcatgttacccaacttcacactatactacaaggctacagcaaccaaaacagcatgatactggtaagaaaacaggcacatagaccaatggaacagaatagagtgctcagaaataagactgcatatcttcaaccatctgatcttcaacaaacttgacaaaaacaagtaatggggaaaggactccctatttaataaataatcagcatcatttattaaatagggacaaatataaataattctgccataaagccacatgcatgcgaatgttccttgcagcactattcacaatagcaaagacatggaatcaacctaaatccttatcaatgacagactgaataaagaaaatttggtacatatacaccatggaatactatgcagccataagaaagaacaagatcatgtcttttgcaggaacatggatggagctggaggctattctccttagcaaactaacacaggaacataaaaccaaataccacatgttcttacttataggtgggaggtaaatgataagaacttatgaacacaaagaaggaaacaacagacactgggatctgcttgagggaggagggtgggaggagggagaggagcagaagagagaactattgtactgggcttaacacctggctgatgagataatatgtacaacaaacccccacgacacgtgtttacctatgtaacaaatcttcacatgtaccccgaaacctaaaattaaaattaaaaaaaagaatcactgatttacaagggttcccagaaggccctcagcttcccatattagctcatttaatgtgtaaaattacataattaatggcttgctaaaatattactctctatttaaatgcaaagtaatattatatcttatcattcattttataagtattcaggaagcaataatactatgcaaatgtctacatctgtctcatggcacctatttttggttatatattatttgatatctgccttgcctcctgttagatcatttgttccaaacagtgtcagaaatttttcatcttctattgccacctcagcagctggccttgctcctgtacatagtgagtacttttcatttgtgaagtgtataactccgtgaatgatggaattcacgcctcatcatgagcgagtttaccagtttttccaaagagccaactttgataatctcctaggcactgccaatttccaggtcagctgcgtaatgccttcatgatctccaagcctctgtttcctcatctgtgaagtgggcccaaaaagccagttcctggctcacagtaggtgcacaagaaatgtccattctcatccttgcttggggattaaatagctaacagtgtatctgagcagctggtgggaggtggaggcagggtgttttcccagagccctcgaaatcaggccatgccgacggctgcccacccctgatgtccagcctgctcctgcgtgcattmcacaggggcaagactgagcagcctggagagcccttggaacatgtgtatgtgactataaaacatgctgtagccctggaatcccgacatcaaaagggagagcttcagtgcctgataaaaatgtgcattcctcttagcaaaccactccaaatgttcttttctccaccccactgggaagcttgtcagtgctaatgtgattcttatgattcttgctgctctgtagcctcttgatctttaccgagatctctctgcccctgagtgtgttggaaacaaaatgtcctgtctagtgttcagtgcttaaaataacagacgctggcttcctgctgtccattgaaactttactccaaggtctctccccatcaccctctgcccccttgccaagccaggggaaaaagtccagggtaaactggcagatagagaagcagggaggggcaggggaaattaggcattcttagaccactgcaggcattctttaatatcaatttgattttccctgggttaatttttcagaaatatcaacttcttgagatgtgagaaatgttttatggaatgtgacttcccatctctaaagacaaggacctcattttccaagcaatgctgcctaggagcatgtatgaggtcatgcagtctgtattctggacagtggtcatatgctaaataattgaaggagggaatgagctgggtatatttctgaacatatattttcaagcctgggaaatagtaaaataagtcatcccatggtatctgggcatattcatgttttctgttagaaaacgagatkgcaaagtctgcagaaaatagaccatgacaatggtattggctcacaaactcacaaactcgtcaaccccatctcttttgcttaggattacgggggaaatgcattctctttttttgcatgccaatggtttaacagagaagaaattttccttctttaagacaggtcattctggtagtttcagccatctgtaattccttctgggcctctgggagactgagttgtcctaaacatatttttggaaatgccactgatcattgtttttattaggcaactgcaaagctttgtagtaagaggatttgtgttttatttgtttttcttcccctgacccagctggttttgttttaacagcattggaggggaggttaaagtatttgtggcctccgttaacctagcctgtctctcaaagccagcaaagccagaaatcagaagagatagaacaggaacagacaggtcatcagccaagataggtacacccttgatttaaccaccctcaggggtggggtcgacagggaggttgatcttaagatgagtgaaagcttcggagcatgtagctgtcgggagagcaggtcacccccacgaaaaggtatctcaggaacctgagcactcaggaactgctgggaagtaatcatgccaaacaagaggctaccacatatgcccatttttatttgccacacccagtgaaggagcatagctcagccaggctgcaatcagatacccagaaaaggccatgcatggccctaggggtggaccagaaatggcagctatttctgagacatcccagtctgcttggctgaaccttgttaaaaccaaaacttatgccaggtcccatccccagagatcctgatttaatgggtctggggtgcagcctggacataaggtttgccaagctctccagatgactgtgaggtggcactgaggctgcagagaactattgcccagcagaaaatggcaattcccctttcaacgacctactaaatgccagatgcagtagtaaacacttttcccacattaatttcttgatttctcccaattttcctgtaagataagcttatctctaatttacagctaaaactgagatttttagatttttaggctgttcaggtggagtttgattcccattccacttaactccaaagcctattccttttccactcaacagcctcctcagagaatccaaaatatgacaaaataaatacttacggaaactctccagagggctacataagagattatttcattcacttatttatgtgagtagggactttccctgacttctgtgtaatatgtagaagaaagatcagaaactacttaattggagactctgagtgtcttgaaggggatgtggccgcagtgcccaatctccaaagcttccctttgccatcctagcatggctgtccctgtacaaaaggacatgcaccaaatattgcttctgcttttgcaaatcactcttcaagcaagaatctcaaagcccaacataattaataaaatcatttgcatcctgtttagatgagtagcgttttatatgtacaaattccacctctgtccccaggccttccaagagtatgagaatgttttcaattttaaagaatgagcaatagagtaattgaaaggagctgtatcttggcaaacgcaaaagacctcaaaggcatttgtagtaacctatatgagaaagcgtggcaaccacaaagtgtgtcataatggcttgtcagccatgctgtgctaaatggtttaaagataggaaagatagggaagaataaaacatttagttcttaggagtcagatacccctggatatcatctgtttggtcaagtctctgaaggatctggaagcagggaaatggtgacattagctgatgatccagtttcttgggttaatcaaggaagtagggacagccggggccaattaagtagctaggcagccaatgatagatgaatctttataggcaagcgcaaagataatgccgttgggaaaagcaattgaagtcattcaggcacttccaggccaggaaatcctcctagtcttcaagggggaacatgtaggaatcatcaggaccagcctgatgaagtcatctgttcattgtgtagctaatgatccgcaaaagtgctgaatgcacacggggacaggccatatggaatacattttggtggctgagatgtatctgtgtgccttgatttccatcacctttaaaataatccttaccatagccctcttttcctttccttctgtccacaatctccccctactctttatgttcttaactctctaaacacagtttcaatgtatgggtgatttttcttaagtaaggcaaatattctccttcttaatttctagttctgcacttccaataggctctgtaaacatayaagtttccaagggacacatcagcatgttataaaattccttttgtttttttagcacaaaggagactgtgtctaagcatatatatatacacagatgtttctacacatctctggattccttacttgtgttcacattgcagatttagaattggggattttgaaaggaatatgaacyaagaaaccatacttggaactgcctatctctttctttaaaaccagagttccatccagggactccaaagtaaaggttttcaatgagttgtcatgttgataaaaccaaggaacactattctatgtccggctttgttttctccctctctggttgctgctattttgtctccctttcagattcatcctactcctactccttccaatcattaaatgtgggattcttcaattcctgtagtctcacctcattttttcttttttagacaatccattcatctttccagcctcatcttgtcccagcttcaaccacatcttgccttgttcacaacttctgtgttcttccacaaatcacaagaccattgcacctgtttcctaagcctggaatactctcctctagctttttgtgtggttagtacttgcttatccttcggatctttgttcattcatcatttattgatttttttcagatttggtccagtctccctcttatgagctctcataacaccagataacatttctctacactgtgcatcccagttgcaattttacatccatttgtgtgattattttattaatgtctgtttctctcactagactataagctcttctgtttttatatcttactgttcctattgttactgactcaccttgcactgcccacctctcttctttataggttgccacagcttctaccaaccaatggcttactctgtctcacagattctgctaataagctttttttctgtgtctttcaatttctactcttactaccaactaaagtttactaccatcctctctaaatttttcacatccacactctaatatcaagaagatctggtttgtttaatttatatttattgtctctttttcaaagctcctatgatagaccagtgtatggcttccttgctaacacccaagtggactgcctttgggtcaagggcatgctccattcattgtctgtggtcaggatagaggggctgagatgtcagcatccctaagaaagaacaataagccggatgctctctccatcacaacctgcctgctgggagctggcagagttggggagggatcatccttgagaactggagttgggaaaaagaaagtaacagaaaacaagcatggacaattggggcatttagcatcctcctccttggtctgtgttccactcaactaaatctccatttctctgcatataccatattgttaacacaattaaggtgtcacagaagtgaagttcatttaggcctgatgagcaaaggaaaacttaaaggaatatttgaagtattttgggagtgatagagcctagtgaaaaaatgttagatgtctgggtaaagaaagtgccctttgggtgcttgtctacacctggttcaccttcactccttggacacagcccttcaggacctctacctaaagtgaagggggccctagactccaacctagcgatatcctatgctagtgataccttacctaaccgctcacaacatgaggctgtcaaacacttgctcagccttcaactctcaactgcctctactaaaaaaaaaagatataatcataatccaaacagctggcagaaatgagagttttattgatcttcagaagaaccaatgaccaccatcccttacctgggtagagcattatagtggaggggctaacaacacagattctggaatctaggattctagaatccaattctggcttggccacctaccaactatgtaaatttgtgtaagttacttggcttctccttgcgtataacataggattacagttcttacactaatttggttgttgtgatgactaaatcaataaatgtcaagagcttataacagtggtgacattacatatgggtgagctataattattgtcgttattactattgtcctttagaggctacctgatccaattagtagccaccacctgaattactcatgacacatttggttataagaggcagaagaggaaatgtattggctgacacagcagggacgtccaaaaaaatggtctggcacagctggacccaaaggttcagatgatccatcaggactctcagtgtcctgcgcagtggcttctatgtgagtcaatatcattctcaagcaggcttcctccaggttaggacaaagatgtagcttgataattatcccatgcttagacttcttcctcagtggatctaaaagaaagactcaaatagtccctagttgtgctccatcatcaaaccaataatcagggggatgaattattccaactgattaagactggccctcataccaccttgtagaaaagaggaagggcagggccaaccctactcaaacagtatggttctctggaggaggatgctgaacacaagatgccccctgttcaaccctttgaaaaggcacaatctggggccatttctctaagaagggaccagatgactatgattgacatgtttactgaaatgtttaccctatttccatctgaagagttacaaacacccatgagtgatgttcaaaatattgtataacctctagagcagaatctctgaccagttcgtctgaacatctcaccactcagaatggaggtctgctaaagacaaccaataagacgaaagactgtagtggcacattcctgccgaacagcaatcctgcatcaaatgcaaactttgggctgatttctaggggacttcaatgtttaatcctattcattcttattgagcaaacactatctagctttggctggcttacttacccacctgttttgaagcaggacccgagtagacaggcatcttcaggatgggactttctgctctttcatcactttttcatctcacatgcgtgaactctgcactgggacacacacttaggacacaggctataagagctgaagcaccaataaccttgacatggacccatgtatgtactttgcttgtctttctgttctgggccaatgttgtccttttttctggcttgggaaagcaggggtccccctctttcctcccttctattagtctaccaccaaatgcctcaaaaaacagccctaatctcagcaggacttatctttgtctatgaatatgctatccctacaaattcagattggatgaaggatcctttgattagagatttaaatgagggacaatttaatgagccaattcagcttagctaaaaagcatctaccaatatctgctatgaagtgtggggggtgggggaagtggttatgttccttcttatcacactcccttctcttgagttgatgtttttaaggtactttgcacagagtctatacaaaatagatacctcccctgcctcccaccagccctctagcgtatcctggcttcagttgcttgcagcacctcgtagaaccctccacctcccttcctgccttccaggtgcaaggyagtacctgggcatcagtgcccacacctgctccccaggagatatctcccttccctacttcctcctcccagctagtgctgctggcctgcagaaagacttaaagatgcttgccaagttgaccggacctttacttccctctttctagtgggaattgatggatttcacgcctgtctcttttcagggctgcagagagtacagcaacttgcgaaaaacacaagatacttcagacaaagactgcaggaaatgggattcattatctatggcaatgagaatgcttctgttgttcctctgcttctttayatgcctggtaaagtagcgtaagtatccaaggcatctcataatcacacctaaaccccaaggtgacctaagatggctttttggcacaggcgttagattatgcatctggaatggggtgagtgagttcagaattcactcgtacggcttctcggaagccacctgtcastctatcagctagacccttcccacaggtcttatagaaagggaaccaaaggtgctgagactgagctctctccctaaattcaagttctgtgaatttagggwaatcacttatctccctcagcctcacctgtaaattaagcacaatcctgagcctccttctgacccaagatcgttctcagggagaacttctgaagatcatctctccccatattaccataaaaacaatgtgatcaggctctgtgctttctcccattgaactctgcagccgtcctcagaagaggacattctcatttcaagcgtggggaagctgaggctgagagcagttaagcaacctgcccaaagtcacacaagtcaaacagcagtaaaactaagatgcaaaaacccaaactgaggctcacattgaagctcatgctcagtttctcatgcccttactgtgaacctgtttgggggttgtttacttgattgcaactttgaaacagcattagcaacaactgcataaagaggaaaacatgactttttgtcagtttggcagggacaattttatacatgagcccttctccaacctgctggagactaatgtaattatactaattacatgttgttaaaaggaagttaactggcagggcacagtggctcatgcctgtaatcccagcactttgggaggctgaggcaggtggatcacctgaggtcaggagttcgagaccagcctggccaacatggtgagaccctgtctctactaaaaatacaaaaattaggtgggcmtggtggtgcatgcctgtagtcctagctactagggaggccgaggcaggaggatcacttgacaccaggaggcagaggttgcatgagcagagattgtgccactgcactccagcctaggtgactgggtgacagaatgagaccctgtcaaaaaaaaaaaggaagttaactaagctcctttctcaaggtaaaatgtttatttttatctctgaccaagcacatgatagaaattcatattcaacatactacgcatcagattctagaggtcctaactcccctccaatgtaacccattgctggaactttctgtttgactctctaatagcctgactagattggcagagtacttgaagtattgaaaagtaccaataaaagaggtttgggtcttacttgtgaaaactcatggagggcaagactgagttataagttcctaaaagacagattcttcagagtatgctcttgggtcattttaccacagcaaaatcacaagcagttaaaacacacatgaaggctgggcgcggtggctcatgcctgtaatcccatcactttgggaggcccaggcaggcagatcatgaggtcaggagatcgaaaccatcctggccaacatggtgaaaccccgtstctacaaaaaatacaaaaaactagccgggcgtggtggtgggtgcctgkagtcccagctactcgggaggctgaggcaggaaagtggcatgaacctgggaggtggagcttgcagtgagccgagattgcaccactgcactctagccagggcaacagagcaagactccrtctaaaaaaataataataataataagttttttagcatgccacatcattcccaccagttggccctttgttcacagatctgggtcaggaaaacattgcatgaagtatctgaggacataatgtgctacagacatgttatatatcatactgctctgtgataatgttaaggagggttgacaacagtgattgaaagtagcagacaattcaaagatctttaaccatctgatttttgaagacacatacaaacayacacacacacacagacacacatacatttattcaaaatgattggggaaatgatgtgtgttggaagaaatattccaaacttggctcaggtttatctaatattttatcattagctcaaaagaaggcactgaaaataaacttgtccaaggtataaaacacataattctggagtgttacaatgacagtagggagtgttctggatagttccaactttaataataaaagccagaagtagaatcccaacaggttggaaaaatgaaccaacccaatgagaagagtccgtaagtagtgaaaacaaatgcatgtaacttcaagaattcacacaatatgctatgaacgatatgcttcatataaaagttatgctctatggtgtgatgaaaggtttggaatcaaaaagaaatttgattcttcctcttcctagctggggattcttggacaagttactcagctttctgaagctccagttttctcatttataaaacgggatatgatagtatcttatttcataaggttactgtgaagattaaacaaaatgatgtccatacagcatttggcatgttacctcttatataagagctattcagtgttagctttcattattaatagcatcaattaataaagtcattaataatgtcatttttagtaatgtgtacaaagcacttaatatagtagttggcatgccataagcattcaatcagtggtagccatttcactactactctgcaacaatgatgatcattatcagtttcaactgagcgcaaggttgaatcaccacggttgcatggctctccaaaataattattacaatttttggttgcattactcaaaataaaatgtccagaaaaaatagtaggtaaagatcctgctacactctgcttccatattgctatattagatgctggataatatgtcaaacaatcttgtttctttcaacttaagattgttttttaagaagagctaatatcacagagtactaaatatatgctaagtaaggctattagacctcagcgattacccayggagggtaggatgtttagccctagtttataaatgaagatgctaagacttagaaaggtcaaattactttctaaagccgggtacggtagctcatgcctgtaatmccaacactttaggaggctgaggcagatggatcacctgaggtcaggagtttgaaaccagcctggccaaccctgtttctactaaaagtacaaaaaaaaaaaaaaattagctgggcatggtggcaggcacctgtactctcagctacttgggagattgaggcaggataatcgctggaacccgggaggtggaggttgcagtgagccaagatcataccactgcactccagcctgggcaacaagagtgaaactccatgtcaaaaaaaaaattactctctaagactcacacaggttgtaggcagcagagcccagaattcaaagccagttccatttgcttcataaactagagctcttttgaacacacagcacaacctctcaagctttagtccataggaaaaaaatgcacatctcattaaagcaacacagagtctaattatttttaatgtcatcattggtgattcaaaaggcaacaatcactacaaacagaaaaaaaaaaaatctgggtcacctaaggaaacagaacaggttagttacaaaaggtaatattatctattacaggtaggagttgctggcaagagtttgccctgctgtctggctgtgtttccttctgtgatatttctttgttggaagtttatatgtagagacattttttgaaatagggcgttaattgtataagccactgtggaagcacttcttccatttggtcatttaaaaacctttgattttattaaagaatggtgatctctccacatttcctactatgcagaatgaaaatatagtctgtagccagttatccttttgaacaaagccttgttataactctaccactggaatcttctatagagctgtgcaatgtggttttacccataaaacatacacttaaacaatcaagaatatattgtatttggtacttggtaaagggtttgcattttttcccctgttcatgtaatacacttggaagatggtgttatacaagaggtagtgattctgcatacaatgcaatgctaatgtttattatcattattattatttcacaaagtttagtttcttttagcctattgccaattgctttggggagtacaaacacagaggctcattatataaaatttccagtgcaatcatatatattaacttaagaacactagctttagtagtgtaaggtttaaattcaaaaatgctccagggagacgccaggttagactaatgaatcaacagagtcatatattttgccctgcattctttggcaaaacgtgcttcctttggcacaaagagaaacatgcagacagtgaaagcggtcttctgggagtcctgaaaactggcctgagatcatgggtcaggtggtttgtactctagcaataaaagcacttgacttgtttctcagacaattatgagctctcattctgtgcagttccgtgggcagccttccatagggtgatcaagaaagagaaagaacagcctctgttttcaagctttmtcagctagaaagcttcatctccttctaaccttcctagttgaaatcaaagggctaatgttgcctcgcccaagccagggagccagagaggctgtgtgtcttgtgggtcctgcagtctccattgcttcatctgataacctatgttctatctgaaacaaccaaaaggcagactgctcaacagcaaaacaagtgaatggaagagcaggcttattctccacgtctggttcaagaattcttcctgagctgtgattggaatgtttctctggtgctgtcagcttccagcctaaaataatacaccagcaatctcttaatgctaagaacagatctgaggcatttacctcacttatgggtaaagtcactcagtagttaagttttcctgcaaagactaacagagcccaaaggggaaaaagagtcacttgggagtacatgcctttttgtctgaccttggctctcagcacaagatatttacagcctttgagcttgatattctagaattgttacagagattagctctggaaaagaaakagactagaaggataaagggaaggaatcatagcttatgaaggttttactctgcatcagaccgctttctagttctatgacttaacgtcctataggctgtaaggttctctgcgtgaacacttctttcctggcctcctttctgccccattcctcttaaactcagttgctgagtttattatccctgtgcatccctgggyatgttcattcacatatgaaacaatcaggagaccttgctatttcttatctctgatttgatggaaaatataatctttggygctgcagtgggaatattggcttggggttggatactacagaccctctgatcttggtcttcaaattatactcattaagtataggctcattgaaatttccacattgtattattggtattaagtttataaaacatataggtttacaattaatatagattctttctttatggaattgcattataggaactatttggtttttatacctagggaccctgcagatggattttatatcactgcagatttgttaaaccagagtcataaacatcagcattttctgcttggtgtcaaagactcaatatccacaattatctaatgagtgtgtcagacccataataccacacacacaccatcatgagtggcaccaagtgactgactgcctgtttatttgtcaattttatttgacagaagtttaaaaacttcaatcatcttccacttaktatcataaaaaagaaaaaagaaaaaagaaaaaatcaattagccatattccttttttgtcaggataattttktcttttcccaactaaccactttttttttttctttttttgcttttccttaagggcttttgcaaggcatatgctagagaaaaaaattggagtggtggtcgtgggatttccagccactcccctcrcagaagctcgggctcggttttgtgtttcagcggcacatacccgggagatgttagacacggtgagtacaccacaggccaacgggatctcagtaccagtaccttggattcaaagcaagtccttttgttgagacagcttggggttctctgggtttctcttgggttatttaggaaaacaacactgacaaaagtcactgccaaaaaacaagagctcgtcaacaacagccaacactgtgaccactcagtagatagaaatgaaaatcagtttagtgaagatttcaatcagtgttttggtttcctacaaaagactgactgagtagccaaatgttcttctatttacttgatcttaaatgcaaaagctggtctaaaatgctgttttagacttaattacatgcatcctgacatttttcatagccactaaatctgccataataaaatatgacccaactaagcaacatgttggaaaaccaacaagaacaaatctacattacagcagcacctaagtgaggtggaaatgattttaaaattgccttttattgtccctcgatttccattgttatgtgaatgagtaatatcagagaactaagccatctactcagtttggagttaatgggaagagtcacataacataaatgcagttttgcaaacactattgagagtcaactatgtgcaaacttggggcaaaaagtctaggagaagatgctaataaacaagcaacacatataataccagacagaatgaatgaatcttgaagaagaaatatagaaaactgtgggatcatgaaggtggggtgaattattagagtggagaagattcacaggggaggtggcttttgagccaggcctttttaataaagcttatcgagcatcattcaagacttccaatcagtggagtgacacaatcatgtcattatgaaataaacgtgacaaatgaactggagaggaaaggggcaaaaggaaaggatctaagatgtagctatttaaacaaaacaagagatgacaaggctaatggtagtggaaacaaaagaaactaatccatgaacaaatattacaaatgaatggaactgccatgacttgacaaatgattggatgtggtgcatatgtgggaagagagaatcaaagacaatttgaggtctttagccctgatgaatagaaggatggtgaagcacttaaatgagataaggtatacagtaaggaacagcaaattttcaatgggagtgggggaatagaatgagctcagtcctagacatgttgagactatgtgtccatggtccacctatagaagaaaaataaggttctagagcttaggagagtatgcaaagctggaactgctatagtttagggaactgagggatccttacagccaacagtagaagatgtaattgtccagatatgagcaagagtgaacagggcagactcctggggagtgcctacattccagggtagatacaggaatcgcaggtggggacccagacttacatggaactagagcagtcaggaaagacatgttcagtgtagtattaaactccatacagaggagaaagtttcaagaaggaggagggtcaaaatgcccctcaaaactgcaggaagtttaaatgcagtgagtgatgagaagaaactattggattagcaattagtaggaacttgatgttccatagagtaggcattttaagggaatgaagggaacagaaataataaaaaaataaaagagtaaagaggataacttgagtttgaaattatacacgtacacatgtgcacacacacgcacacacacacagagttgccatgtccttcgtcttcaccagtatagcctcaaaacataaaccattgtattgtacacagtaggtacacagtacaaattattgagtagcatgttaacaactgagctaaccagattttgagatgagtgaactttgttttctttacacccttctatatttcccagattctctaaaatgagtatgtatttccagaatgtgaattttaacaaattgtttcttttaaatgaaatgagttggtgttaagaaaagacaggcaaaactttcaagaagtctgactgtagaaagaaaaataggtttagaaaatacccttgaaaatgtagaaggcttgagcatgtttacacattaagggaagaagacagtgaagaggggaccttgcacagaagggagagaagagagcatggccgggaagcaagttccctgagatggcaggagggacacacagcatggatgaatttgtaattttgtgctccaagcagcactgaggtattcatgtatgtgattctcttcacaacttcttaattgctgcaaaacacctgctttgaaaggatactgagacatcagtcatctagacaaatgcctctaaactgttgagatcatgtgcccatctcaacagaaaattttgagcagttccttaatgtacatgtaagagaaaatggaaaatgaccctgatgaacagccagtacattaaggtagcaattgaacctaaaggctcatagactagaaataatattagacaaatgcactctgcgaccacatttggacaagacagagacaaggccacaatacttaatgtctccctcttctgactgacatgtgtgacagttgctcattcaccaataacaactctagcctcgctttcattctctcgcctttcagatagaaattataaatatatagccagccagtgaactgctcccacttcttaacagcatccaacccagaactggtccctgcttccttagagtcatctcaggcacaagctcaaatgcagtgagaagccactcccatcttcctgtcactaagatgcccacggttcttctgcagtgtcctccctctcccatctcmgcaagctaaagaaacctaactctgagcacgagtgtgttctgggtggtcttggatcagcagacattaacataaattctttataaatgatctatgcaataccaatatattacgtacattatataagagacacacaaataaaagtttaaaaggttgagataaaaatgaatagaggtcgggcrcagtggctcacgcctataatcccagcactttgggaggttgaggtgggcggatgacctgaggtcaggagttcgagaccagcctggccaacatggtgaaaccccatctctactaaaaatacaaaaattagccaggcgtagtagcatgtgcctgtaatcccagctactcgaactgctgaggcaggagaatcacttgaacccgggaggcggaggttgcagtgagccgagatcaygccactgcactccagcctgggcaacagagtgagacgctgtctcaaaaaaaaaaaaaaaaaaaaaaatagaaatcctaatgttttcctcctgcatcctccataaattatctcacagatgccccaaatgtgcagatccttcactttggataccactgaactagtccatcccccaccttcagcaaagattgctagaaactatcccagagaggtgtcattttaaagataactttggttactttttcttagtactgagatttgatgtaggaaatttagaaaaacagggaagaacattttaaatactcatactcctaccaccaagaaatcaattactgttaacaagttggaggaaatcttaattaatgtcagtttgaaagrtttcccaaagaggaaagtccataagatctattagtcacccattctaacattaacaaccctcaccttaccttttcaaagcattagaccctaatattatcttcctcctcatttggcaggttaagaaaaacaggctcagaaaggttaaaaaggcatgaccaataccacaggattggtgatatactagaattgaaaatgaccttttttttattttattattaatatactttaagttttagggtacatgtgcacaacgtgcaggtttgttacatatgtatacatgtgccatgttggtgtgctgcacccattaactcgtcatttagcattaggtatatctcctaatgctatccctccccactccccccatcccacaacagtccctggtgtgtgatgttccccttcctgtgtccatgtgttctcagaaaatgacctttttttacttcctggatctcatttgtttcatgtgcaaaatgggggatacatgtacccacctaaagtaagagagttgaaacagacaagttctcagtccctgtgagttaagttctagtattttctgggacacagagatgagtatttaaaagcaggaggcctggggtagcatgagaggacagaggatgatgttaatcagctcccgcaacattcctctttgttcttggccaggtgatttgctgtgtcatgaagatataacttcaaatgcattctgcaaccttatctttttcttccacaagactacatataagtcactacattttaaaataaaaccttttaagggtaagcatgggtcacatgtttttattcttctcttcacactctcaaaataaaataaacattcatagtatggagttagaccactaaataaaattaattagcatctaacattcctctagggtcttaaaccacaacctaatggtacggatcttgcttcttttctttaaaatcaaagaagctagcaaactaagactgtgtgtctttgtgaggcttgctattaatctgggctctgcaaagcagggctacttaggtgttcaatgatagctattggaaagcaatctcattgcaggttttagaagctcttgatgaaatgggtgatctcttgcaactgaaatattcccggcacaagaagtcagcacgtcctgagctctatgatgagacgagctttgaactcgaagattaagtttcctggtcctgaatgacacataaagactttgcgagaaagacctccctccttgcctcacaaggaatataaatggatttctcccccttcctcaggacaattttggttcccagaccagcttgaytgaactgagggagacgttgttgttttwaatgtctccagcttggactgcagagacaaaaacatgattccagatttaagtctctcttcttccaagtattctactagaaatacacacacacacacacacacacacttctgagaatatttttaatggcaataagcctgtgttttagctgctactgtgcagaccctttcagggattccaaccaaatgcaaatgagagaatttaaaatttttattcagtaagttcactatgtgtttacttattccatctgcagatgtaagtgagtgtggtggacagtagccaccttccttgttccactcataaaagcatcagctagatctcatctgtatcatgggaagttccaggcaggagggtaaagaaatgttgtttctaccatttgtcacatttggacgtttttcacagacaagtgtcaaaagacatagttaatgtttcgagggggaaagcagaactgatcaactgcgactagagacgtctttgaaggaaattttccttttcctcttgctggtctcctacagttttacagctgagcttttgaggtttggaaaattcaagatgtttgtttcataagaaaaggggcagaaagcaagcacaagacacttttaggtctagactaaaatggtagttacaacaatttgaaccttgttggtgcagtgyacggtgaatgcttaccctgcacagcctctattaccttaaggaattagttgtcattttcctattgaattttgagtaaatggtgaaattcagtgtcctttagaatcgactcccaagactatatttgaagaatgcattgattcaagaaggacatttaaaagcaaattctgactttttcaagaccaacacacttgtttaggcctattaaattgtactatcacttgttacatgccctctgaattgggagaaagtgggcttgcacactttgaggtaactaactgtaatttacttgtgttctctctttcttgctctccttctcaacatgaacacaaacctctatggaaaagtagcctcttgttaatctgatctagtttgtatggaaaaagcccatggagaaccttatctttaacaagctcccagagggtgcccagatttggaaattctagagagcagtggtgaccttttagcaaagcttctgtaacagttcgaatgagttgcagaacattccactccatcaaatgacactgtaaacaaatcacttcaagagaggcttggttttgtgtggcacagatggacccaagctttcatgctgtgcactgagatagaaactccacccgcagcgcctgcgatggatggagcagtgtgccctgatgctcaaagcgtattaaaggaaaaaaagtgatcagcatggaaagtttttatggggaaattataactccaagtgggtgcattggtttaaaaatggatcacaatgatagagttcttcatgaatgtttacaagttgtaaggaataccgttagtgaaagaggaaaagaagtgggttctgaaaatgcagtttcccatccaatgattttgataacaaaattccaacttttctcaatgaaactgatgcagtattatttgtgcaaataaaatgtgtcataaatatgcaaagaaagggagacatactgttcttatcttgaatatgtgcatttaaatgaattgtccaaaatgcataaatgccttgcgttctataaaggaaacaggaggtcaaaaagacagcgagatatctagtccttccacaaggtatggaaagcaataaacatcttcctttctttctggatctgtctgtgatctttacacacaccttcacatctacacttcaagttttaagcccctagacatgtgtcttcatgagcaggaatgtccactattattactttcatggaggatattgggtctaattcattgtgggaaactacttacctacccagcatggaaggcagggaggaagttagtctcttttcatcaagattcaagagtacaggggcaatttattacactgcaatgtacaaaacaaaaggacctgtttctgttagagagtccatgttgaatatacaggtatgagaacaactgttgatatacaggtataatccaagtagaatgcttccacagtgcattagaaggtgcccaagctccacagggccaataatattagagtatatgtcatatagaataaggttaattaggagggtgattgtgaataatgagatttttaatttttttaagaaaaagctctcaaatgctaggctaataagttcatgattttaattcatgattttaattcatgattaaaattatttgattattgagtcttgataattatatcatcaaccattaccctctacatcaccgccccgaccttagctctaattatatcagagccaaaaatgtgtctttggttagatctgttggaaaagagaattttctataatgttatgcgcactcagcccttctgttcacatttacacacatgcacacacacatacacatatgcatttttcctttacggagtaagcaactatgaaaatctggttggttgagaaataaatggaagatgttcttgaaaatgacctcaggaaagcagaagataaaggttccagatgatatttgtaaggaggctatctctgtataataaggaaatggcatagacttattcctaatctcattatgaaacgatggtgtcatggacgtttaaccatattgcctttcagcatgctttgattttacagagacgacaggctttggaatttactaggaagctggctaaaatccatacccctaggccctacaccagacctttactgaaacataatagttgtagtgcccaggaatctacatttttaaccagccttcctgcgtgattctaatctatgccaaaatttaagaacattattcaaactctaatttgataaaccaattgactctaatagcaggaaccttgttctgattctcttgttcataattaagtgtatatatactggtaaaattaatttattccacagtcaaccttctcttctcattgggacattttgttcccattttccaagtaacttctctttctacaaaaattgatccaatattgaagaaccatctgcgattcatttgggtaaaattatgccttcttcagttttctgtatcattccctataagatgcccatttgctttgaatgtggtatctttcttttctttctttctttttttttttttttttgagacagagttttgttcttcttgttgcccaggctatagtgcaatggcaagatctcggctcattgcaacctccacctcccgggttcaagcgattctcctgcctcagcctcctgaggagctgagtttacaggcatgtgccaccaagcatggctaattttctatttttagtagagacaaggtttttccctgttggtcaggctggtctcgaactcctgaccttaggtgatcctcccacctcggcctcccaaagtgctgggattacaggcgtgagccaccgtgcccggcctgaatgtagtatctttcttctgttttcttttcctgctctttaaaaaacaaccttcaacctctgattatttattccaacaacagctcttcagtagggtaaaagtcttaacagttcttcaaacgaacaatattcttttgtatttttcttcagagatagcaaatgttataaatggcctactctgatttaaaaacctaagttccgatgatgatgaaacattaactcttaaatatacattttgatttatagcaataataacaattgtaacaacagcaattaagaacagcatctggtgaattcttggcaatgtttcctggtctcaaaacagtaagaacaatttgaagtctgttctttagaatgccctactcagctgcataatgtttagaaaattaaagagtctgtattttaaatatttttaggtaattattgcgggacattgtcttatggtgtcctgatgtacgtggggtgtgcatgtgtgtgtgtgtgtgtgtgcatgtgtctttgtgtgtgtgagaaggacagagagaaatgtatgtttcactgaaacatttgaaacgaccaatttcactttattgtgcctgtaaaatgttagttttaaaataaataaaaataatatgaaaataattgatggttttctgttgatttagtttaggttaccctgaaaaaagactgaggtagagatttgtatttaggaattccactgggaaaattggtaggggtggctggagctggcttgcactgtgataagaactaattgtgcacatttctttctaattcctcattcagtgacatcagattggtagcttgaaattggccacaatgggagtatttacaccatggaaattggcagacactacaagtcagggctctagagagctgtctgttaaacatttactagcacaccactgagaccacctacaatggtacaatacaaacgtaagagtaaaggaacaggattggaaagaggaagaatttgaactatgatgttatcatagcaaaggcctcagccaattccatggaaactgggcaactgagatggtcctttagggtcaagtcaaaatgacaaggatgccagatgcaagctatcagtagaggtgtggggccaggcattaccttgggcaggtctgttgagctgacaacaatgcctgggaagggactcagctgtgatttattattttttaaatgatttctaattgatccattttttttaaagttttatatcagaaaatgttaaacatacgtaaaatcgaatagtataatgagcccacatgcacctattacccagcttcaaacattaccaatttatggccagtcttttcttctattccccaacccatttcactccctctctcaccagattgctttgaagcacatcccagaaatcatattatcagtaaacattttactgagtatctctaaaaggaaggggtgtcttaatttattcttcttttcaacctcattaaaagataagtcttcaggataacaaaggcatcaaaaggagtcaaatgttaaccttttctttccctattgtatagcctgcatgtaaattccctggattaaaactagaaattatttctaaagtcaatacgtggtgtcttgaaggacaataaagcaatcatttttagacacttaccacatgccagacacgatattaagaactgcaacattatcttccaagtactcttgtagagattaataatggcttcatcttggaaggcaagtatattcaagttatgaggggattaacagtgcataaagaggacttccaagactttgatggtagattgttttttcttagaatgtttatcctcttccttatcaaatcaattttcttaaaaagttattttagctaaacgttatatattagcaggagtaattcaatcaagaataagggaacaagtgaaaccagtttcatttggaaaaggttgattcccatgccaatctgggtttaatgtagggactggttattctaattttcattgcatcctgtggtccaaatgggaggctgaattctgacatttgcaagtcaactgctctgagaagttatcacagatamaaaccaataaaatatccaacaacagaagttcagaataggagcaaaaggagactttgttttgctgtggcatataacagcgctcccttttattcagcccagctgctaatttttatatcaaaagtattgattgaaggggctagtggttttggccctcacccaagtttattcaagatctttcttaattaggtttgggtcggctgcagtgcccatggccagggataggtctggctccaatcatcacatcgtgctcttacttcattatgggccaagaactaaggcaaggaaatggctgctgctttgtttctccagcccaaatgtgtggggttttttcccagatctgaagcatgcgtggactaaaggcataaggaagaccaaaggatgtgtaatggcttcgctgtgatgaaatcaatctaccctacaacttaactatgaccccagcatgaataaggctctgtgtgtgaaaagtgaatgggtagcaatgtggggtcatggaaaatgctcctggcatcatttgaataaaaacttttcaacaggctgatgcagccaatcagtctatcagtttttttgcccttttaagggcaaaataatctctgccaacaatacatgatttccccttaatgtgtctgttttgtaaataattgtggttgtcatacaactatttttatagtgtccatctcaattttatataatttacaccagtcttttaaaaaaacgttatacatgtaaagcttcaattaatcatagccacaaattataagcacctgtaacaaaataggtttctttcatatataaaaatgtgttaatattttaaaatgaaattcagttccctctaaaatattttcaacaaaatatccatgaagagtttttaactctaaaaaaattatcaaataaaacttcaaaatatagatttttaagcgatgtattaatgagacaattctaagtgggaccaatcaaagttaaagatttcctatatagatgaggctataactgctatatacagtcaatgtaacaggtacataatatagaaaaatgaaaatattttattaaagtgggtccatttctagtaagatgaaaactaacattttcaaaagttacactgattatttgagcatctattgtttctaatagcgaattagagaggaagtatgactggtattgacatcagtcaacatggctctcgattgtgaatagaaatagaaagccagagattaccagttatttgatgaaaaccagcaataccaaagtgggtagccaaggagaaaaaaatgagaaatatcttactgactgaaacagacaattcctggaaaagttaactttttaaaagttctaattatgatctttgtaggtcaacctgattgtataaagaaattacatccacaaaacaagaataggctgatatgtaaaggaacccagagtttataaaaattaaaaatatgtaatattaaagtggtgaaaatcaatagaaagcaaagaagaaaaaatctttgaatctcagaatataaagcaaaggccagaaaaaaatagaaaacatgagaaaaaatgtaaaacgacaaagaggatacatacaggaggaacaatatccatctaataaaaacttgagaaagcattataatccctgaggctgaaacaaaatggaagatgaaaatggactagcaagtgctaagcggatgaatataaaaagatttttatctaaatacaccttcataaaatttttactatcccaaggataaagggaagaacttaaaattgttttcagctagaaaaaaaattttcacctaaaaaggtaaaagtaattgcttttactactgaatattataaacatggaaagttcataccaattttcacatctgttaacagtgtataagttatccatttctccaatctgcaccaatactattattatttttataacatttgtcaatcttataggataaaaaggggttctctttcataaatgatgtccatttatagtgatttcttttcatatatatatactggctgcttgtatttgtcttttgcacatttgtttgaatcccctgcta

SEQ ID NO: 95741 - DNA, 13291 bp, Homo sapiens
gttttcctctaaatgcaaaattaagattttattcttggctcacttcacttctgtatttacacaggtacagatgtgtagattaacagatctagttgtcgcttccacagttacccttctgcaaacctgttccacctagcagtcagaggtatcttctaaaatataaaaatgcaaaagtatcttttctctgcttgaagtccttcaatagctcctttttgcagttagagaaaaaaatgatacccaaatccttctcgctgtttaacaaggtccaatacaatctagcatctttacatgtcctcagcctcaaccttcaccactcatccttctccacttctgcctccactgccatgttgatcatattagatccacaagaacttctttccattcctagcacatgccaggttccccttccttaggccctttgctcctgctgttcccaaggtaaggaatgctcattcctcagatctattttggttatgacagctgaaagctttttcccaaagatctggaacaaaacatggatggctactctcatcactcttattcagcatagtactagaagcccagcccaagcaattagacaagagggaaaaatacagaaaatctaaattagaaaggaggaagtcaaattgttcctgttttccgatgacataatcttatatatagaaaactggaaagtccaccaaaaaactctcagaaaggatacaagaacttagtaaattttcaagacacaaagttaagacagaaaaaatctgtaatatttctatacacacacaatgaactagctgaaaacaaaatcaagaaggcaatcccatttgcaatagctacacacacaaaaaaacctaggaataaatttaaccaaggaagtgaaagatctctatgttgtaggaaaatccaggttcttgtcacatgactaagataatttaggcatgaggactcattgtagggtgagtagggcagagtttattgggtgaaaaagaaaaaaaagtgggaaaaagggactctcagcaaagtgacagtcctgctacgaagtttcccaccttgcagattgaatccttggttatcacccaggaacaggagaggctaggctactcccccttgtaaacagtgctaacgtcccacggctccaccccatcctcccagtgcacaggacggtcagaggttctcaggagaccccttttgaggtggctgtctcattccccactctgaagtacatctaactgccgttagaataaggataaggataaagaagaccaatcctaactgcctcctgccgacaggggcgctgttttggggaaatggcagtcagatctccctcaaaggcctctctaagtgtccctagcagaaggcgccattgtccaaggctccagttgcatgactatttggagtttgattgcctgaaggagagaagaaacaaaccaggttaatagaaaacatgtatcaaaaccaaacaagggggtgggtgaagacagctcaaaaatcctgaggccttttaccagttcacacagggagatggagggggtgggggacaaaagctggactggtaaggaaacttacttttgtgcaggcatgtcatagttctgggcctccttctcctgagcccagtctgaagccaaccagtctaaggtttgggaaattaactcttcccagtttggaggatgcatctgaggggagtgttccatagtacggagacacaattacttatcattaaagagatgacagaggaggaaaaaggaaggtgttttttcaaggagtcccagggattcaagatgcatttgaaaggggtacagactgaagatgaatggctactcatctagaaagaggggagccagtgcctctgattcctttctcttcctagcaaatacacaggatacatgagggaggaaaagtgaggtgttcctctttctttcctccatccttttatccctgagtcttggtgactgtgaccagtggccatgggtgttaaagtggctttcgcccatgttaacagtgagggcctaagaggtgggagtatccattctcacccatgtatgccctatctccccttctgtcagtagcctttggattccctagacctcatttatgccatggatactagcgtagcctttatccatgaaactggaagcttggcttaattggcaggaatcagccacactcacctgcactatgtcttttgacttccgttatcatctgcctctggatccctcagatccagttttctttcctaggcctttgactcaaaacttggaattaagtttgggacaaaaatgcatcttggagtgggttgcatggactccttatcataaaccaaatgctaaagtgaagctgtggaattgagtcctcttccaacaagggagagaaaaggatgtccagtgacatgcctagataactggtggctatagttatgcttcctaggatttgggtgcatgttgcttggctttggttagctcccttggtcttactttcccccacctcccccccagaaaaaccctctgagtgatgggcaacctatttattcccatcacctggtaggatttgcaggataattgctcagaactagaatattgatccagatttctacattacccatcctgtttgttctttctgagctgcacacagagatcactggttggttcacaggaacaagcagggttagtctgaaaatgtaggcaaaaactgaaaaacaactaatgagtttagaattttaagacaaatgtatgataaattttgaaacataatttctctctctccagtcctcatttttgttaaaaacacaaatcatgataggactcagttgtttgcaaaattgaatttagtcttatacttggcctgattatttgcataaagtgcagcaaaaataattatttctacataggccttttgattggctttgatggaatgctgttccacaagtaatctcaaataagatcttttaaagccacgcccagacatgtatttgtatcctcaaatacctgtgagttgggtaatcctcttgtcttaaggttccaagataaacttggagctcctgggcctgttagaaagtgacattctttactgatcacaggtcatgaaccctgtacaggaactgcatagacaaggctctgagaccagtttcctcaagggactttttttttttttttttttttttttttttttttttttttgagagagtctcactcttgttgtccaggctggagtgcaatggcacaatcttggctcaccgcaaccgctgcctcccggcttcaagcaattctcttgcctcagtctcccgagtagctgggactacaggcatgtgtcaccatacatggccaattttgtatttttagtggagatggggtttctccatgtttgtcaggctggtctcaaactcccaacctcaggtgatccgcccgccttggcctcccagagtgctgggattacaggtgtgagccaccacgcccggccttccccaagggacttttattggctctgcaagttgagcttgactccttaaagagaagcatacccttccagtcaaagccttggtaaaacaaccagttactccaattgcatcctgttgcaaaagaaaatggatttttactgcactgatgcaaacaagtatattgctgtaagttaagaatactcacagataatttccaaattctacaggaaccaggcagagagaagcaaatatactccaaattttgttcgcaggagtatactctactcaatgattaaaggctataaatagttcaaaatatgttttcttgactctaaaaaacaaaacaaggatcagcaatatccaagcaaaattgagaaagattgcttcatttttttgagttcacccagttaacccttattttgcttgatatttatgaacattttagctcttcatgagttctgtacatttttcctttattccaatgtcacaatccccaaaggtatgagaaacctgtatctgagagcacttgtaaaagttctctagcttattataaaccatcttttgaaaaagattaaaacaacaattgtctgtgaataacaatatgtccagggtagttacagttagaaacacaattgacaaagttttgttatctctgtagtttacaataacttaacaactttaattatgattgataggatattctttagacattagaattttagaaattccatacaattttggaacacatattagtattattcaccaaaatatgacctaaagaagactgaataccattttggcaatcccatgtacctaaacgtgtcacataatcctgtttacctttcttttctgaacactccaggggccctctgaagtatctgaaaagccaggtgtcagaaaagacaattttgaaactgaagtttgattttggaaagcctattaaatatattagaggcttaaaatacttgctgttatgaaatagaattccggattaccataagttatttattttgctgaaataacaactaagaaatttttttaaagaaaaaaccttgtacagccctttcatacaaattttgctgacgagcagattagtgccttaaggataccttgctgtgcttttatttgaatgctcaatttacagaaaaatcatacaatactttttgaagttagtcaatatgttcacacagagaatttgttgcaagattaatttttacaatccttccaccagttgtttgaacttttagctttatcttatctaatttaaaacaaatcttcaaccctaggcaggaatttacatttttatgatttcttataatctttattaaaaacacatttcactgtccttacgcaccttgcatgtaaatctatttccaatagtctcaattacatgtcataatggtaacttttagcagtttttaactttaatgtaaaacctggtaagttgttttgattatgtgctagatgcagccaaggtttgactccttccaacataattaagggagtgtttagttccatgtgtccccaggccttgccaattgtgaagccagcaaattgaaaagttctcaaaaaccaaaaaagcagtttatgaccttaaaatattttgccaacctagtatctgacctgcataatttagtccacctatttacatttttatgacatctgctttttaccaataatctttaaggctgtttttatttctccaagattaaagtcacgtgaactgaaaggtaccacagctttttatcttctctttcataaaatatttgatccaagtgcttgtcttcctttaggcaaaattaattagagctcttttttttatgtaaacatcacacacacaacacatatagaattacacagacaggtagaagataacccggtccccataagatctttcatttgccaatctcctaattggattattggcctctgggtgcttttaatttctggagtccatgagaaaaaaaagaggtctctcctctcttgtgcgtgcattaaaaaagtggcaaagcaaaatgaagaaaaaataattcagttgaccaagaaaaaccttttcccagcaaaacaaggtccaagaaaagggaaaccttttaaatatgactctaacttggatatccacttttagttaagctgagcactccttaagaaattcctcttaactcccttattatctgaatttagccacaccaagtggccaatatttctggctttcaaactttactaaaggctcagagaaaggaaaatccaaggcagttcatggagagaaatggaatcaacaaatagcaaaaggtcatgcagatatcaaaccaggtaagactcattccctaagccaggattgaatccaagctacacagaggctacacaaaaccttgccaagtggttacaggtcttgctcccaaggatgttaaacaagatggaggtcctcagcaaatttgctatggaccatacagaaagacatgcaaagcagaccagattggctacagcttcagatcagcctcacaaatcgtctctcgcaattaaaacactacagagagccctctgctcagtcctgcagctgcccactgccctcctactgtccaccgtggccctgctgcactctggctgcgtcctctctgggatcgctgccaccttccacctgggcctcgcagctgcggcctctgccagagccagctcctgatggacccatgtggaaatgggacctccagatatcatcctggcagtcattgaagactttaagagggacaccaatagcaaaaagatgaatctgggagttggtgcctaccgggatgataacggaaagccttggacgtgctgcctagcgtccccaaggcagaggcccagattgccacaaaaagtttggacaaggaatacctgtccaytgggggactggctgaattttgcaaggcatctgcagaactagcccttggtgagaacagcgaagtcttgaaaagtggccggtttgtcattgtgcagaccatttctggaactggagccttaaggattggagccagctttctgcaaagattttttaagttcagctgagatgtctttctgcccaaaccaagctggggaaatcacacgcccatcttcagggacactggcatgcagctacaaggttatcggctttatgaccccaagacttgcgattttgacttcacaggcgctgtggagggcctttcaaaaataccagagcaaaatgttgttcttctgcatgcctgcacccacaatcccacgggagtggacccaggtctggaacagtggaaggatacagcaacaatggtgaagaagaagagtctctttgccttctttgacatagcctaccaaggctttaccagtggtgatggtgataaggatgcccgggctgtgcaccacttctttgaacagggcattaatgtttgtctctgccaatcatatgccaagaacatgggcttatattgtgagcgtgtaggagccttcactgtagtatgcaaagatgcgatgaaaccaaaagggtagagtcacagttgaagatcttgatccatyccaygtatgccaaccgtccccacaatggggcccagattgcttctaccattctgaacaccccagattcatgaaaacaatggttgcaagaagtgaaaggcatggccgaccacatcattagcatgcggactcagcttgtctccaacctcaagaagaagggttccacccacaactggccacatagcactgcccaaactggcatgttttgtttcacagggctaaagcctgaacaggtggagtggctaaccaaggagttctccatctatatgacaaaggacggccgcatttctgtggcaggggtcacctccggcaacgtgggctaccttgcccatgccattcaccaggtcaccaagtaatgtacctggtgcaaggaaacagagacgacctttctgtcttcagcctctgctattgggagcttcacacagaggatgagagagagcggatggtggtgagtggatcattttcttcaaccacggtgtgtaacactcagcaattgaatgtttctcagaaaagaacgtgtagtgacacagggcagagggatccgtggctggcgtctggaacattgtggctctaaaccaaatgctcccctgtccttttatccccaacttttctcaaagagtttacatgtacaagaaagtcaccacaccaaaaaacctgtcaattatgccattgcaatatttcagaagctttaactgaagtgtcatatagtgtcaggttcctcatgagaaatagcacacattagaggctttgagagaagacctagttctgtcatgaacacttggcctcatgtctgtcctcccatcatggagcagccttatcaacagaccacattgcagaaattatgttttatgaaaaccagtaagtctgctgccactacagcaaggaaaagaatgcagtttcctgtcttatttaagaaaaagagaaggctctcttttctcctttgccattgctgttcttttccttatgcacaaagatttttaatgaatgcagatttttatctcattctactgcctgactatcaaccccatcctattgggatttatttaagaataaacataattttctgctgatgccataccctcacttttctcagcaaagaataatggagagtaggtaactgtactttatctcagcatcctcttgaatgattttgtaatcttctctagttgtgatgttgtctctgcccagttgtacctcctcctttgttgaatgtggttgtgcagtcactcatctcacaccgtgagtccagtggcacagggtggtaccaggaaagaggatattctaggctttgtgtgctgccagttgggttcaggcttcacctcctggaaaccatgtagacttattgcagcctacagatttgtggaacttcaaacttgagggagatgatttagggtatctggcagaagaaacttctaagcattgaagcagttaagaggtgacttgggtgctgttaaaatattcagttttaaaagggaaacagaggataaaagtttagaaaatgttcagcctgatgatgtgatagaaaaaaaaccattttctgtttctccactgtgcacgagataagtggaatacctcctagcattccatagcactgtaggattactacagttaacaataatatgttatattgtttcagaaagctagaaagaggatattaaatgtttccaacataaagaaatgataaatgtttgagatgatagatatgctaattaccctaatagaattgttgtacatcatatctatcaaaacatcactacatactttatgaatatgtagttactatttgtcaattaagaaacaaaatggaagaaaggaaaaaaaaactgtaactaatcccgtttaagtatgaaattgtatttcctatattaaatgcctacacccacactgtgaataaattttatttatattaatatgtaaagttgtaatgtgagaaatgagcttacgaggttgcatttatgacaagattctgttcactgaagagaaagagtacctcaagtatttctatttaccattaaaagtagaactgatttcaaagatctatattcaagagaacagagaaagaaattttaagataatttctgcaagttaaggttatttgtttttaaatcttaccccaaataatgcaaatgatgccgtgttttcaaattttattttcagtaaatcatcaataactatttccaacaagttatcctgtaaatttcacaattatttgttattattttgcaagaaggtaatatgtgaatttcagatttttatgcacagttggattgtagttgagaaaataaccttaagatcccaaacttcttaatgttgtgactcatacacactcatgtcagaagtgacccaccactgagtctgatggtaccacacttgtctatttcctgtccaacaaggtggattcacccacttggttattaaggaaatgtcaaattgctatatgagtttttaaatgcttactctcaatgtctgtgatatggtttggctgtgtcaccacccaaatctcatcttgaattcccatgtgttgtgggaggcacccagtgagaggtaattgcatcatggggcaggtctttcccgagctgttcttgtgatagtgagtaagtctcatgaggtttaatgtttattataaggggaaattttcctgcacaagctctctctgcttgctgccatccatgtaagacatgacttgctcctccttgccttctgccatgattgtgaggcttccccagccacatggaactgtaagtccaattaaacctctttatctgtaaattgcccagtcttgggtgtgtctttatcagcagcatgaaaacagactaataaagtctgtgtttacctcaccatggactgataacacatagttcatgaactgccactgatccatgatatacactttgagtaataccactctaaggcaaaataagagatagatatattgtaactgctatgatgatgatgttagcaggggaactggggatgttactataggcagatctaaaaaatccaataaaggttttttcacttcaattttaaaaactctacattttttactagtagggccttttattaacatgccaccatctagcacttcacgtaatatatgactctccacacaaatgtttgccatttgtttatttaactaggtaataataaggaggaaagatttgagtcagcttcagtaagcatttctaactgcaacagactttgcaagtaatcattttattcaaaagccaaataacttacattctatgtgtgtgtcctaaaagaatcctggctgtgtacttatttacataacctttatttattgtcctttatatacaaaggacaataatgcatgaggcagaacatttcctttcttctgaggacaggagaattctgaatgcaattccagaaattaacagtcttgtgcttatgtattaactttttttcatatataatagacatgggcttacatttcatttactgtgatgacacatttaagaaacctagtcaaatttaaggccctgcaatcagatccttttatgcctgtcttttagagtttgaaaaaataaaggaagaaaaaaaaatttaaaccaccgtgatgcactgaaactcactcatttttcatagacacttttctttataagggttatattaggatagttatggctatatagttttattatttttattatccgtatgcatacatagcaaaatatttgttacacaagcaataaacttagatattaacatcatatctccttttccatacttcctcagagagagtcaaaaggtggaaggactattaaggcactacttctgaaatgtgatcgaggttgtttcattatcatgtaagaaaattataatcttactgtatcctgtggtgcaaagtatgtgtgtgtgtatacatatataatatatatatatacacatacatatatatgatatatatatatcaacaaattataagttaaattgaaggatgattatagctttctatgtcatagctaaaaacaatcataactgacaaaaagtcatctgctttttaaaaataattaatacatgttattttagaatagttttagggttgtggaaaaattgagtggcaagtgtagatttctgatttatcacttcttcctccctcacaatttcccttattattaacattgcccattagtgttgtacaatttgtcttgatgaacaaatattgatacattgtaagtaagtccatcgtttagggttccctctttctgttgtacattctgtgggtttgacaaacatgtgagatatatctgcagcagcctcgttgtctggggtaaataccaagattcttagtctcatggccaaggagatcgaggtctcggacacacacacagacagagtgagtttggagcaggagtttaataggcaaaaggaaagaacaggtctctgttagagagggatcctgagaagattgccaagttgtagttaagaatgtcagagtttttataaatgggctcttgaggagggggctcttgaggaggggcttgtgaggaggggatgtcttatctttctagggccccagggtttagttgggaccaggtgtgccatctgtacagagcagatttttttatcatctcttaacccactccgtgaccacacaggccaactcttagtctgtgtttctttgtcctgcttatctggtagggaaagtttctgtgtctgttcccatacatcttcttgaagctgcaggcatcttggtgcgcctaaagagaaaggaatgtgcttattaaggcccactgttttactggggcccatcgtgtaagtgtgaagcttggtgattacccgggagactctcggctgtccaccccagtccttctgtgtcccagctgtcttttctgtgttttactgtctgctctttcaggcctcttgttagaaaagtgatttctttgaactgcatgaggttagcaagggagctatttttgagctgctttttgttaaaagcaaagttttctaccggggactggctttaccctgtctacccaaataattcgtttctgcctcctataacatatccaccattacacatagaatagtttcactgcctaaaaagctcctgtggcccagggtgggaatcggccccgggtggaggcctccattgggttccccctaatcccggggacaagggcatcctctgggtccttatcacagggtaaggggtccaccagacccggacaagcgctcctagctggaggagggtcgcgttcctgccggatgtggaaaggaagtccaggaatccccttcctgtctttctggtttctctctgggcttcctgctcgggtcacaagcgccagaagcgccggcggctgcggggaaacggtaggcgggggatccagccccaagcaaatctcccgcgggcgcgtgggaggtggggccagtgctgggcgcagccgcgcctcgcgcctcccgccccccccggggctgcggcggggacgcttctctggagggtgtggcggaaacttgaggcttggagtccgcgggaccggaaggggctccgtagctcggggcagggtgggcgcgagagagcctagaagcccatgtagccgcgaatcccgcagccccagtacacctccctccgtgcctccccgccttttctgcagagctccgccctggagtgaaggaggagccgtcacctggagctccgaaaaaagcagaagaaggcgctttttatttagccagtgtgaccccgccagggccttctcggttgggtgagcactctctctgaccaggccatgaaaagaaaaatctgtgcgatgcctccccacatgtcacgggactctgacttgcctttgtcgtcagagtttgcagaactttgggggacctgagaggggagtgccccctggacgggccacggctgtctgtggcttaagggcttttggaagggcggagagagggaaacggcgtcctagtggcctgcttcagggccacccacgggccctcccccaacctctctctgatccaacttgtttttccagcctagttggaaacttgtggatgctgtgacctcaagaagacttggcattttatttggaagatagacatctatttgcaactgtcctgagcccctattttcctcccacctttcttggggaaacttgtttttaagggatgccactgtttttgtaacatgttgctcctagctcttagcattcatggtactgttgtaaccgtccagtgggttcactttgtctgctagatagagccgatttatcaagacggggattacaatggagaaagagtaattcacgcagagccggctttgcaggtgatgggagttttattattactcaaatcggtcttcttaaatttgtgtcccggagcagtacgttctaacatttt

SEQ ID NO: 95742 - DNA, 144354 bp, Homo sapiens
  misc_feature (1)...(144354): n = A,T,C or G
atcgtaggctatcagctggaggccgtccacagctcttacaaactgcctatatttccttgtcaagtggattttccccacatgatgcatgtattaaaatttaaactaaattaaaaattttaacctccaatttcatttcaacaccacaatgtaacttttggtctttcccctttccatatatgttattctcttctctaacaaccagaaacctggatctcactatatttgctcacttttctcaagcctagaatataaagaagtttcagaacttttaactcataccctacaaaaagcaaccctactaactagtttcaatatttttaatagatttttggggtaaaaattacatagtgatttcatttatgcacaatttgataactttcgaaaaaaagcacatactcaacccacaccagttttcaagacacagaacattactatcacccaataatgttccctcatgcctcttcgcagtcaacttctctgccagagcaaaccattttttgaattattttcattgtagattagctttatctgtcctagagcttcatgcaaatggaatcaatcatatatattattttgtgtatatagtataatgtttataatagtcatccacattcttaaatgtatcaatatttcattcctttctattgctgagttatattctatttaatcattatattaaaatttatccattctcctcatgaaataattggagatttggaacttttggttattaaaggtaaagccactttgaacatttttatataatttatcttcagatataagtttttggataaatatattttgggtaaatatctataaatgaaattaatagaggaaagggcttattcttaactttataagaaaaaggcaaaacctttttcaaaagtggttataccattttaacttcctaccagcaatgtgtgagagttctgactgctacatatctaacaccaaacatcatgtggcgttagcagtctttttaattttgaccattctagagggtggaggcagatctcacggtggtttaacttgcatttccctgaagacttaggtgttgagtatttttacatgtgcttagtgaactttcacatgtcttactttattaagtgtctgcttaagtcctttgctagtttttcccctattgagacatttatctttttattattaagctgtggagttctctatgtattctggatacaagtccctgttagataaatgttttgcaaacattttcttctagtttgtggatttttattttccttatagtgtctttcaaagagtaaaagattttaataaaatctagatgttgttgttgtttccgtacagttaattgatttctgtgtcctcctaagaaatccctgctgctcccaagttgtaaagatattcttctatgtcgcctcctagaaatcacatttagtttttagatctgtttcattcctaattaacgtttatatataatataaaatattggttgaggatactatttttccatataaagatccagttgttaaagcattatttattgaaaaaaactttacttttatttaaagaataactggtacctttgttgaaaatcaactagttgtataaatgatatttctaaactctttattctattctatggttctgtttgactaaccatatgcaaatgccatactgccttgattattatagctttatagtaaatcttaaagctaggtagcataagttctctagttttattctttttcaatattgttttgccattctgtatctcttgcatttccatagaaaatttgttatctgattttcgctttccatgaaaatgtctgctgaaatacgattgggatcatattgctcggtttggaaagaataaacatcataataatattgagtctgccgatcaatgaatgtatctgtccatttatttaggtctttttgcatttctcccagtaatgttttataacttttagtgtatatttcttatgtatattttgccaaatttatccctaagtatttaatgttttttacacgattataaataatattgttttcaaattgttcactgttagttgtattagtttgttagtgttgccgtaacaaagtaccacacactgggtggcttaaataacagaaattgatcttgccactgtgctggggactagaagtccaagatcaaggtgccagcaggttggattccttggaggtgtctctcctcggtttgcaaatggccattctcttgctgcctcttcacacggttatccctctgtgggagagtatcaccggtgtcacttttttgtgtgtgcaaattccctcttcttatagtggcaccagtcagattggattagggaccactctcatgacctcatctaaccttgattgcctctttaaaggccctatctccaaatacaatcacattctgtggtactaggggttagggcttcaacatatgaatctggggaaacaaatcagcccataagactagtatacagagatacaattgatttttgtatactgaccatttatgctgcaagcttgctgaatcacctcttaattcttgtagttgctttgtgcattcctttgggtattcctcatagatactcatgtctgcaaatggagaatgtttactttttcatttttatgccttatatttcttttttgtgtttttgctttgttgcatttgttttttctatttgtatgaccaaaatctttagcagtacaggtaggtaacaaccaaataatgtagaaccccataagccacgttacagagtttgaattttattttagcacagtgggaatacattgaaggtctttagttaagctgttgctcatgagcaacaaatgagcaatgacatatatgtatgtatatacacatatatatcattgattttatatatatatatatatatatatatatatatatctatcttagtccacttgtgttgcaataacaaaataccacagactgggtcatttacaaaaattaaatatatatatacatatacacacatatatatatcatacatatacacatacatacatcattgctcatttgtttgttataaatagcattaacagcatttttcaagttatatcctgggagtgtttatgatttacttattcttcaactaattccataacaagatttgaggtgcttagaacaattcatgccaagttaaaacaaaataattgggcaaattgggataaagaataaaatggagttgaaaaacaagaggcccaggtaatgtcagttcaaaatatgcttacctttaactactttaaatttacaggaggtatagttacacattttggctgaatctcccagagactagaactgtttgagacacttctgttccccaatcccttgtgatatgtttctcaggtaataggccttcacagtaactcccaaactatcatatataccacacagacttgagattcactattgagagaatctatgtactgtttttctttttttttcttttttgttatagagccgggggtcttacactgtcactgaggctgaagtgcaatggcacgatcatggctcactgcagccttgacctcctgggctcaatcctcttgcctcagcctctcgaataactaggattacaggtgtgttcccccatgcctggctaatttttaaaaattttgtgtagagatggggtcatgccatgtggcccaggctggttcaaactcctgagctcaagtatccttctacctctccctcccaaagttctgagattacaggaatgagccactgtgcccagcctatagattgtttttcttgaagcaatttttcagaaaccttcctggtttctgataatttaaccctttcaggttaggagagaaaaatgaacattttgatattacccactgtcttagtccatttgtgttgctgtaataaaatatcacagactgggatatttataaacaatagaaattaatttctctcagttctggaggctggaaactccaaaatcaaagtgccagcagatttggcaactggtgagggctgctctttgcttacaaaatggcaccttgttgctgcatcctcagcaagggtcagtgctgtgtcttcacatagtggaaagaatagaaggggccaactgtctcctttgggcctttttttaaaaaggcactaatgcattcacaaaggcagagccctaatggtctaatcaccacttaaaggcacctcctcttaatactgttgaattagggattaagtttcaacatgaattttggagggaatacaaacattgaaatgattatacgtgtttatttaatcaagtatccaacaaaagcaaataattcaagccccaaattcactgcatctttagtagataagcagagttttaaattacgattgatctcctgttaggaggaatgcatggatttccacaagaaaaaactgtactgaggagaaactttccacagtaatgtgccacttttcagtcaacgacagaccacatatatgagtcccataagataatactatatttttactgtaccttttctatgtttagatatgtttagacacacaaatatcattgcattacaattgcctacagtattcagtacagtaatatgctgtatagatttgtggtctaggagcaatagcctaagtgtgtagtaggctgagccatctattttgtgttagtacactgtgatgttcagagaaggatgaaattgcctaaggatacatttctcagaatgtatcctgttgttcggtgacgcatgactgtattccatgagcactataatcactatcatagtaacacattaggagagaattctcatttctaaatccaatataatttatcacccattagttcatactctactgctttgattgcttttctttggttgtggctacctgcatacagcagtaaagtttcagaaaaactgaagtcgcaaaaggtcaattactcaatgaaggaaagataaaccattgcattgggggactagaagatacttttaaaagttctcagattatcaatttaatgatgtgtttctatgtagtgaataatgccttaaattcttgccaagagtatttagaaggaagttgtcagaagtatatcagctaactcatttttttttatatcactgctaatggtgtcattcacacattgtgcaacccataattccagatttaattctaccaaaaaatataggtcattgcaaaatgccatattaaaactgccaatgcatgacaggaagatggggatgcagacaaagcaaaggatgacaccaattccttttttaaagaagcaagatagggattggacaaaaaggctgagccatttttaatggatacttttgagggagtgttaattccaatttaattaaaatgatgcattaatttaaaattgggataactggttgccctcgactgcacctgggttgcgccagtgctctcggattaacctaattgtacagaggtgcccttgttttctaacttcatgcacaaagcattggaaattatttgtttgctttttcttttccaagtaaatctttttccagttatgcaaaagggaagtttgaggcaatggttaaaggcacttaagttataattattgctgttatcattaacattaagcacgggtatggctttgttgcaagttacccacctacacctgcaaatctctcttgctagcacacgccccagctctctccacccgcagtggtccgtggctggaccgctttaagtcactgagcgggctgggctctgaaggaggtcggtcccgctcctcccagacccaagcgtagggctagggaaaagctaggcgggaaggtcattgcactcccaggccccaggaaaagggcccagggtctcatcatctcttactttcgggcaaaacttcccacatcgcgaccttccctccctggggcactctgagaacacacccagtcacctagcgcgctccccagaagtcggcttggcacacagcgcaccccagcggccgcgcggcctccttccagccgccgccacttggcttccggagagctcgccgggcgctgccgcygccgccgccgccgccgcctcctgggaaccaggggactgaagagcctgcgagagcggaacactgccggaccccgggtgggggggcgcagcagctgcgcctggccccgcccaccacacctgggcgcccgtagaaccgcgcggggcggggcggggcaggaggctggcctggcgctccggccgctttgtcgaaagccggcccgactggagcaggacgaagggggagggtctcgaggccgagtcctgttcttctgagggacrgaccccagctggggtggaaaagcrgtaccagagagcctccgaggcgcgcggtgccaaccatggagcgggccggccccagcttcgggcagcagcgacagcagcagcagccccagcagcagaagcagcagcagagggatcaggactcggtcgaagcatggctggacgatcactgggactttaccttctcatactttgttagaaaagccaccaggtaagaagaggacccacggaagacccggggctgatttctctcccctgttgaattgtgcccttcgttcacccctgttcccaggccctttgcttttgaagtaggtcctcggtcctgttacgaggtagaaacctcaactctaagygagcacagtcgaaaaactcaagtgtcggatttgatacaacttgctcacaaagttcaaatacaaaaatgtacttgccgacctcccaccctcacccccgaccctcttggtattccccgggaacatgattattttcatacatccgtgctcacgggccttcccctagcccctctctagccctctggttccccaaaatccaatcagcaaaacccaaacagtttctgagccccttccctgcagctccggaagcaccatttccaagtcggtcttgatggctccgctcctcccccgtcccccctcgccctggccctggctgggcggggaagctggggtgagggacgagtccacgggacagcccaaaggcaacatgacggaaccttgccaaagtgagtgcggtygccttttccccccttccagtctcctgcttgtcccgcgcgcctcctttcactcgcttttccgccgaaggctgtgccgccaaaagtagagctctgcagaggggtttgcggcgtgcacacaaagggcgcaggggaggcgccgcctggagcggaccccaaggggcagcgcagaccccagaggccagctctttctggtccagagccaagcgccggggcggcccttgcggagggcggggaggagggagcctgtccttttggaggcggctgcgcagcgggcagtcggggcgctcgtgggaaacgctcgcgggagagttggggaggaattgagactgggagcagagggacaagaagagtggagcagagagtgcttggcgggcgggtgccccgaagcctgaggaattgatgcatagtcggggtgcgtggactccaggacgcgcccctttgcagaaagagtccgtgccccgctgccgcctgctctgggcagcggccgtcgggcagcgggtgctggccgtcttggccgggagggtgacacacgcccggcagtgatggtcgaggagcccgcccgggttcgacgcccgggtcccactcgccggcgcgcggccgcggctctgccggtcgctccccgccaggggcggcgcacgcggtggcgagcgggaggcgacgggcggcggcgcggaggccggggccgtgagggagctggttctgagtcgccgacctcacctcacctcacctgcgcgcgttgttgcccctacggagcctcctggagtccaggatcggcggagttcgaaaacgaacttcccacgtttgctatgttgccctttggagacaaaacaaggtacttccttcagcatccccctacgtcccttcccactttttccgggggcgcggcgggtctcgggtgctgggtggtggcgcccyggtggcaccagtgggacgatgtatcattgaaaattgactgtataacttttgttgttgttgttattctttgctctcttgcagatgtattaataagggtcttaaattgggccctttttaatcktgttttgttttgttttgttttgtttttttcctaaggaacatccagagttggtgtcaatttagtcactttcagggttttttgacagaggggaaggctccgggattaatcttttcwmtttaataacccagcccttcttttaaaatcgtcttcccccgctttcaccttcttccttcaaaatcctaaatcttgagcgcccagaggatagccctgaaagggcacttttttgcgagtttagcgtgagacactaaggccatggaggtctagaatgatcggttgctgtcgactaacagttttcaggggtcacctgcccctctgaggccatctgcacccactttcctttcactctgcgcattcccagccttctgctctccttgaattacagcgcatagaatgatcagggggccagagaaccaggccgatttttaaaagtatgtattggacctgttctttaggcagattataaacagtttaaagaaaaaaagttattgtttaataaatcagcataaatgtcctttcttcgttccctatttttcttttaaagatgtaaactagggatggcttgttggtcgtttttgactagtcatagataggaacactgcattttcagaacctaccaacactttgaaagtgtagcaacattttaatggaaaataaatggaaagagctgagttacatttcttttcccattactttttctcccaagcagcataggatcaaaatcctatttctcaaatttaccatgctcactgtaaaatttagatcatctgaggctctaaaaaaacttttaaaaaattttcggttagagtttttaaattacagttgatgttggcaacaggctgaacactttctgtgatatatatatgtatgtgtgtatacatattcttaagaggttatgttgagtgtaagttggaaaatgaaagtgtaaaatatttaatagtgcaggtcctcaattttaagagttataataaagtgctgagagttgtcagagtaaagaatataacctaagaatttgtgtgtagccagaggtctttcatgaaacaatattccaatttggttttatatttggtggcattaacaggagacttaaaatgtgaataagaggatggacatttgttgattataaaaatgcaaaccactaaccccagtgtggttcacattttgtggtaaaaacttattgcatacgttttaactttacagctaaggatttttttttttwaaagtaggagctcacattactttgcttttcccctctttttacactttgtaagtgtaaaatgaatattgtatgtgattcaggaaacccatgaaacaaaatagttctgtagatgcatgcggcatgttttaagatttaaaatatatttatattcacccagatcgtccatctgcaccagtaatcaggcttgctgataaaaacaatttctgcattattgttgtcattcgayattcatgcatgattttccatccttttctcagactaaatgatctacactcaatggtagttattgaacatcaaggttctggcattcctaaattctcaaacacctgtgaatttgggttgaccttgaaagcatttatgccattatattacattgtttactatcactgtcttcaagtagagagctacgcatcttattaaaagctataggttgggcctggcacggtggctcatgcctgtaatcccagcactttgggaggccgaggcgggcagatcacgacgtcaggagttcaagaccagcctgactgaccaacatggtgaaaccccgtctctactaaaaatacaaaaattagccaggcatggcgcrcgcctgtaatcccagctactaaggagaatcgcttgaacccgggaggcagaggttgcagtgagccaagattgctccactatactccagcctgggcaacagagtgagactccatctcaaaaaaaaaaaaaaaaagctataacttggagctttttagttatcacarcctgtttatgtccatttgaaggtgtcaattgaatgattcagaacatagtcggttggcataaaaattaatttgaggccaataaatcacatctggaaaactcccaggtcactattgtagacaatttgcagtcctgaaggcctcagctactgtgttaattgagggctttaatgcgtatgccttttacaactgaagctttcctggtgctaatgctgcttaacagctgttgttattcttgacagcatattagaataaagttacctttcattaattactaatcagctctgtgattgtgggtgatgttttaggtcatttaatattgttaaggatgacatgattgactttattgctttgttttgtacaggcaaaagctcgagaatatttggcatatactggaaataagagatattaagtgagggcaagtttttatgacagcttggatcaaagtccagaaacagacgttttacactcccatatagctttctatgatagactttatttgatactgcaaagctgtgctgaattaattgaggttcctggtcctgtgtttggaattccgtccttcattttttttccttgtaattcttctctcacttctaaaagctgtagcatttttattgcacggtatttacaatacaatcagattatgtatataaatattgctatgtatttttttaaattattgtttctataattatataggaatataaactttccacaattttcagacaaatgaattgttaagcatattttgtgaggcagttgttagtgttgatgataataaaaccctctgagcattgacccagtctaactttgatattgtttatagtatttttataatggtaattctggtgcaataatggcctttttttcttatgttgttcataaccagggtccatataaccagctctaagctgcttttagtgtccttgaagcactcttctggattgcattcttcctgcctggagaaatccataggagcccctgaaataatgtttctcattgctcttctatctctagtgttttcaaagtttcaaattcagacccatgttagagcctaaactacatgattcctaaaaatgtggtagaattaatgcaatggcaattagtgtagatggatatcttcaaataaatmgatttgcttagtataacacaaacttaaataggcttgtggtatcattcagtagctttttttcagtctgtcatctgatgatctgtagaaattgtcaatattttcacacgtttatgtcctcarcacctcaagatgaggaaatttttagtattttgattatgctatgcaaccaaatttcctttttaaattattctgcttaaataaatgatttgactctggtctsaagtattatttcttttgaaatatttggaattctgttaaggttgtataggtaaagcttgtagcttcgcccttatctgattatagggagtgtgtcctactttgaggcaccccttcctctagatttgaaaatacaaattaacttagaagttaaacctataattgctgtgtcaagctatatttgttctttgttccaacagccaattgtgggataaaaacctcttcctaggataaaaaaacctttagtaaggactgtaggacaattaaataaatcaatgagttgattgatagtgaagggttgaaaaatgactaatttgtgaatttaggatgcagactagttactgactttgcaggacttcctatgaaattagtttagctgcatagatgtagattcagttggccactattacagctggtgaatgtggcttggaaatatctgttataccaggttctcagggaaaagtgcctgtgagccacatacctaggaataaaaattgaagaaagtctttccatatgagtcattcatttgatatttagctctgtaatcttatttactgactgatattctcgttttaaattacttttttttttttttgcaatgtaagtgcttaattcattttctctgagtggtaggaatttatatttgttgccaaccaaatgtttaaggtaggtaaagcaaactgagtgttaagtttataagaatcattttgataaaaattctaaaaatattttaaagctttttttttctttctttytttttttttttttcgagacggagtattgctctgtyacccaggctggagtgcagtggcgcaatctcggctcattgcaagccgagtttacgccattctcctgcctcagactcccgagtagctgggaccacaggtgcccaccaccacacccagctaattttttatatttttagtagagacggggtttcaccatgttagccaggatggtctcgatctcctgacctcgtggtccacccacctcggcctctcaaagtgctgggattacaggcgtgagccaccgcacccggcctttaaagcttttaaagatatattttctctggtttttagtttgcaatgaaaatgcttttaaatgtcttatgtaccattgttagattttttaatcttcaggagaggggagacttttcccttgattctgaattataaagtaagattaactttttgcaaattttcttctctgaataattgtattttacctaaaatcgggagagaaaggatcaccatttgatatcatgttcatagtgataattataaaaaataagaattatcttctctacttttagttgaatacctatactgaaaatatacaaagagagaagaccctgacattctgagctgatgaaataattaaaacacacacacaggatcactgaaatttagagttagtagggatcatataatctcatttttcttttctttttttttttttgagatggagtctcgctctgtcgcccaggctggagtgcagtggcrtgatctcggctcaccacaagctccgcttcccgggttcaggccattctcttgcctcagcctcccgagtagctgggactacaggcgcccaccaccatgcctggctaatgttttrtatttttttttattggaratggagtttcaccttgttggccaggatggtcttgatctcctgacttggtgatccccccgcctcggcctcccaaagtgctgggattacaggcgtgagccaccgcgcccggccaatctcatttttcaaacttaagtaatgtactcctattaaagaaagacattctttttgatttacaatatattagaaagcttttggttgcaagtgacagaaactcaacttgaacccatagagaattgatgcacataattttaattgcttgcgggattgggttagctgtgaatttagctaatcaaataatgttgccaaaattctgtctgtctctgtgtctatctaactatctatctgtctatctatctatgtatctacctatctctatttatcttttcatctatctactctgtttacctgcccttccttgcatctatttatctgtccatgtatccatttgttcatgtattcatctatccatgtatcttttggccctgtgctgtgttggctttattttcttgcatgctttcttcatgtgctgagagtttctacttgttaactgtatgtgggtcttaaacttctgatattagagaggtgccttcttatccatatcagtcttccccagattaccctggtctcacctgggtcacatcccaactctgaaccaatcattgtattcgggagagtagggttgtttgactgttttgttggggcacgtagcccataaggtgatatatcattggggagggtacattcccaaaagaaagtgatgtgggcagacccagaagttctagatgtctaccataactagtgttgacttccttttattttaatgttagtgaagtgtggaattcttagaagtagaataaataaaagcagatataatttaatcatagttacaacatttatgcaactgtaatgccaaaatacattctcagttaattacgaacaaaatgataaaaccacagccaaatgcagatttacagcattcattaaaacactcttgcaaagtagatatggttctaactatctgaaaaacagtatggtaagtcagctggcctttgctacaatttggcctataatgatttcacttctcccactgggtctctctgaacaatcatgaaacttattcctctagcacagcataccagctttcattttttacttgctatgaaggcatatatgcatattaaatttacgtcttttattttctcattaacacaaatataaaccttagaactaaaattgcagggcagtagttggtaataagatggtcttcccagtaactgaaagcaatttctttcactttcttttgttttgattatgattattgtgaaaatataaaattagaacattttatagaacaaagtaaagatcttcaaaacatacttgttttgaattctgtgggctctcaaacctcagataaatgccattgtagtccagtctctcccatatctaaactgcaaagccaactgatttacatgtttagtgcatagatttgagttattgttttctttcagaagtggtaggttttcctttaagcaacttcttttataccatgtgttgtgaatgtacagaaaattacaaaatattttgtcccttccaattctcagtcaaatttgaagttaaaatcatatgaagcaattctgcattttaagcttctcagatgttttcatagctggagcaaacttagaaatactaaataactttgggcagactcttcatttccttaccatgccagacccaagcgaactactcactgtaacatcagagtagaggttattggaggatatcacttagaggtgtccaaaatctcccgttttgtttaataatagtctgttaatctcttaatcatctaaaccattgcttctcaaaagaagatgttggcatttggtggtgacacttttttgttgttagaggctgtctagtgcatagcaggacatttaacatccctgaactccagacactaaatgccagggccacccccatccatgtgatggaaaatctattcccacacatttccaaatgcccctcaagggttggcaccactacttgattaggagccactgttgtgaaccctttgaaattgatttctgtttatggtgaagggccctagataggacagccttaggcttcaaccccagacctacttttctaagaggaagactttaggtgcattatttactctctctgtaaaatggagataatgtcatttacctcatagtgttcattagaaaattaaaggaaataatgcatgtttccttatctttttagtggtaattttcagtagtttaccattttaccttgagcatcatcagtgccttaaatgtaatcacaaactttgataggcatttccttatcctggtagatgggaattaagttctgacagcatagtgatttcatagactttaaatgtcattttcattttttagatgaattttattaatggttcgaacagaagtttttgtgggattgtgtaaggtactggaaagggaactggaatgggagcccagacccccagattttgtttccagctttgctattagctaactttgtgactggctcaagttaatgaacctcaaactttaagaygggaggtgaaagagggtgaagactcaaggcggagagattcataagtgagcttaaaaatctctttcagctgtaagagttcttttttctcaccaggagagccgagtatcagtttctcagattgaatagtttcattcttttaagtatttttccaaatttgagtagtggatccaggtcaaattatgcaaacaacgtaactgaaactgtataaaataaggatccaagagcaggaaaagtagccaacataattttttatgtgagttattttgtgttttccctaattttagcagatttccatataagttatcaatcatactttccagtcagaaaatttagtatactctttgcaatgctggtattagtgattaattcacatgactaatgaaaaaggcattgaaaagagaaaagaggatggcattttagtagctgacttataaacacaaaaatacaccctgcaaatctcccccaaaagttactgctcaatggacttgctatatggacatttttgaggtccaaggattggtatcaccctacttttaggatttacccaagtaagtacccatggataagaactaaaacagccaatttaatccataaattacctatagcagagtgttaaagcrttgttttatcagatattaaaactgtgctccagtttagaattatgaagtattgctatggtgttcatcataggtaattattgtattttttttamatttgttgtcaaacagttttaacttttatattttgggaaaaaatagtccccaaatctataacttatttttgacaaaaaaaaagtctctaagtagtactgaaaaaaacaaattatattcttgcatttatttttttcagttaaatgtttatcacctaatcttaatatgaaattcagaaaattttgttatatgtaagtgtagatattagtctgaggagtccattttttaaattgtaatttgaaaaaatacatgaaaacagccctctctcttttattttaatatgaaatacctctgtagagaagttattgtttttaaattaggggcttaggaagaagcaagagccaacatctacttattctgctgtataaatccattaaataatttttctttatttaaaaaaaccaaaaacttaatcagtttaaaaaatatactccacttaatattcagttaacttaaaaacaataactatcatgaatgaaacactgtgtatctgactccagcatcatttcctttacttttatcatgatctccattttacaaagagagtaaataatgtacctaaggtcatattcttagaaagaggtgattctggggttaaagcctaagtctgtctcatctagggcccttaatcactgtgctatactgaaagtcagtgtcaatattaatgcaagcaaagcaaaggctcatagatttaatgtcatgaggtttctaactcaggaagaggttaacattttcttctacggcctctttctrtggaagcacattacttaatgatgtgcctaaagactgcccaagtgagtttagtttccatatataatttcagagtataaaaattgggaaatctcaaatgacattttaaaatagagtggttgaaaatttcggtactaggccattataattatctttttagcattagaacacaaataccctagtacagtatattttcaaaggatttttatcctttgatacattattttaggccagagtgcaaaacgtattaaactagttgctctacgagtaggtttcacctagttatacttttaactcgtgagggttattatgtttatatcaaaagtttactttgccttgtcaatttttcttctcttttccttacttttctagaagccaagaaatattctataaaccttataaaatattttaattaattttccatttcaagacatctggaatattgaatatgtattttaaagcctttctgtctttttcaagattcattttgtaatgtgagtgagcagttccactttggtagaaagtaaagttattgccacagggagacccttcggacacagacacgtgtgtgcgtgtgtgtgtgtgtgtccctttagctaattatatttgaaatgcagttccagggcttgcatccctgcatcctgtcaacaagttttgtagtcctatttaatacttctagatagagggcatttggaagaagccgtgacttgtgtagattagtggaaaatttctaaaaacccaaaacataaggtgtagttttctattttgtgataggtttataacaatcttgagtggaagcgataaattggaaaggggggaaggttttgattcttcccagattatatgccatacagttacatttcatttttttcaatgaatattattaatcaatttataaactttttagagactatgagatgaagtgtacccaatatgcaatacaaatctatttaaatatccataaaaatgtattacaatactaacttggcactatttaatttaatcattaacttaattgagtccatcattttaagagtgccacacttttcatttagttacaaaatatgagcacatagtatgtgtaaaatgraatagcattgtatttttgccgtgtgtmattttgataaaataaactctttgttaaaactattgtaaaagttgataaccattcaccttctaagcttcctaacctccagaattcctttttttttttatcattcacgaatgaatttgttcatccctttgtattactaaagacacaaaatgtctgtcaactttcgccttttcctgcagcagctgctggaaccagggtagtgcacatgctcattagttttgctgggtgctctactcacacaataacatcatcctcttgacaggtgcggtgctgttagcttcatgaaatcaaaatgtgttaaacattatgcttaatgacactgatttttatattaaatcattattttataagcagtttgagctgcaagagtcttctgtaaagtagaatatctggataataaacttctgatttgattcattgtgtaaagagtttcgagagtaagatttgagtcacatttatgacaagagctcaaaaggttttaggcaacttccatttggttttatgtcctaccatctaattaatatgaattttggggttctttgcttgctccgtatggaaaaggatatcttcgtgagccttaagtatcatctgtggaatatgcaagtttgaaacaacaggttatatcgacattagtgttatctgaaaggaataacttccaacggtgattttggggtgcccaccagggtttcttcgtatctcaggatgtgttgtaaaagtttaaaagcaaaactaaattcactcttgttaaaagggtatgtaatacaactcatttatgggtaagaattttttgtgtaataaaatatgtaggaaataagtgattggaggataataaaagattttggtgagaagagaggaagatatggatgtgatgtaaaactcaggctcttatcattgactataaattattggcttcaatgttcattgcattttccatggctgtggctttctttgaagtgtggagggcctgttgtctttcattaatagctttgtaaaagttaactgaaagacttcaagagggcagctaggctttcttctgattgcttccaggtttgcagggcagttagcaaagatacacttatacatgaaagtggagagtccagattattagtacttgtggtaaaagctacagatgcttcartggaatttgtttctgttttgttgtttttgctcagatggctatgatgtaatttaaactgttctcttttttttttcttttttttttttgaacttagtaggagtctgtcaagaatgccattctgaagtatttgctttggccaaggacttttgagtgttcatggtgcatgttgctggcctatatcccaacccagttagggcccctcaacctgtgggcttgtatcaccaaaaacaacctttttactctcatcctttttctgattctcttggctgacctttttgaggaaataacagccattgctccttaacccagccctttgtcttcattggaatgagtactaagggtgtaagagatagcaaattcttagatatgttgaagagatcttgaaatgcttccatgtgcattttctaatttgactcacacatcaaccctgtgcagtgagtgaaggagccagaagacttttcccctayttaaaaatgaggaagttgaagggcaaaaagaagttaagttgacagacccaaggaccacttcttgtcctattcatactgcaaactgtggtggggagtcttaatagcctgttaatacagcagcccatttttaccactgaagatctcaaactccagtgaaaatgaactccagagaagttgtaattgttttagcatcagatccatgtagtgttgtagctggaactagaattatcacctgattgttagtctaatattcctgactttatactctgctgaagacagtcagcaccttacacttcataaaaggccagaactggtgctatttttcttgttttatcagggataaaatggaaactcaggggaagaaaattgcttagtgctagtcacacatcctattagtaacaaatgctgagattagaacccaggactcatggctgaaagtgcagcctctcaatgctttgtaatcccaagaatttttgtcaattagtaaatctcccttttataagtagtttgcagtttgttttgtccctatgcaatacattatgtgggatggttttagagcaaaatgaatgaacttgatttaaggagatattttatgctctagttttattgcaagttatgaatccaagtgctttcaaaaggttcaattatcatacacaggattactttgtggtagtcctttgtgcgctctcaatgataaaatgagcgatttgatagcctggaacttactagtatgctgcatagaacctgccttctctttgttgcctatccgccaacaatttcagttaggaaaagctatgtagaatgactggagtggccagatcaaatacaggacagccagttcatcttgaatttcagatactacttatactgaaaacttattcattatttatctgaaactcatttttagcaggttgtcttttttatttgctaaatctagcaactctggggatgactttttctcgaacacatttattatacttcttttcagtacattgctttagacttataaaatgtgacctgttttcagagaaacatagatatgttggaatttagttagattttttttttatggacactatccttaagaatctttgttccctgagtccttagaaatagtgtttttaccttaagaaaacagtgtgtggtccttttatgacctggaggtaaaggatttcatttgaacatgtgtcgtaagtcatctttctctatgccttctctgcttgaatttgatttttacttctagattcagctagatgttacggagtgccttcttcatggcaagcactgatgctctgggaacttttatattcttaatagggtatagtacctggaataggaaacctggatttgattcctggtgttgccaccaaatagtagaatgggtgtggttcagacatttaattagcttcatattttagaaagtaggaccattaatgcctgcctcaccaggtttaaataaaattatggkttttttttcagtagcactaatgtgaatatttttcaaaaccccctagaattaataaagggaaaggaaaatagaggtcctatcctagaccatcgaagtgattacccagtcagaactactactgaggtttctggatttccatccgttgctttctacttttatattggacatgttcacaatcatcttttccgttacttatttgtgtacatttacctaacttcatatgccagaaacatccaatatgtatataacttctgaacacaatataaacttttaagtttgaaaggaaagatcatgataatttttctggagttgctcattattctgtccctggtgcccaatatagtaccttgtggaaatctctgtcttatgggaataattcgttccagaaaaaaaaagacaattaaagttaattctatcaaaatagaaaaaagttcatgagaaggttttggttggagctttatcttgaaaaatagaaccacagattatgaaaataagtttatatttgagctattaataataaaattgagattgtaatgacactctgctaattcttaggatgaaactctgctaactctgttaaataaattgtaacagagtgtagccataaacaattatcttcagttcatgtttggcttttgcagcagggtcataaagataattttctccctaaactagttttttgaattaatatttgaaggcttcatcagctttgcccaaggggctttcttaattcagaatataattatttgactaatattctctttgtgagtatctgctatgtcattatccttattgattgtttcttcaattgttaactggtctttaattgggcataactcttaattgtcagtggctttgtgtaatagtagaaggattctccaacatcactttagtctatgtctagaaaatctatattgtcttagtccatgctggctgctataacaaatagcttagactggataatttataaacacaaatttgttgctcacartttcagatgctgggaagtccaagatcaaggcaccagcagattctggtggaggcttcttcctcatagatgtcaacttttatgtgtcctcacagaagggcaaaaggagttaacaagctcccataggccccttataagggccctctaataggttgttcttccattgatttaaagaaatacccaaggctgggtaatttataaagaaaagaggtttaattggcttatggttctgcaggctttacaggaagcatggtgttggcatctgcccagcttctggggaggcctcaggaagctttcagtcatatggaaagtgaagtggaaacctgcatatcatatggtgagaaagttatagcaagagcaggagcaagaatgagaacaaggacgggatggtgggaggtaccatgtacttttaaacaaacaacttttaaacaaggccatgaactcactcatcatgaaggggatggtgtgaagccattcatgagggatctgccsccataatccaattacctctcactaagccccaccttcaacactggggattacatttcaacatgagattttgaggggacatccaaactacatcaggcactaatcctatttatgagggcagaaccctcccaaaggccccacctcctaatactatcaccttcggggttagggttcaagagaagaattttgtagggacatacattttagaccatagcatatgtcttatataagaattttaatttcaatttgcaggtgatttgtatttgcatacagactgaagtattttttaaaaatcagyggagtatagatattagtcttaagggcaaaggcccacttcatttggccatatagattgtgcactgcagaactccaaggaatgctcaaagggaaagatgtgtgagaaatgatttaattttatttgtggttggttcatcagtgattttgatgttatgataacatgttttcctctgcaagtatgtaattacagggactcagataatcaataatgtagtcatgagaactctctttccctaccactggtggttaatacggattgttgattgactgactgaatatgctacatctgcttttcctatgtcatttaatattgagttaatgtctctaagaaaatatccgtaagcaacatttatgagacaaatagagtaatcacaaacacataatgtagaacttttaggcactggctctgcttaagacatatgctgcaccaggcactgcaagtatacaagcataaattagtcacggtcagttgtgagacttacacatccaaggggtgatgaacagtaatcgctaaaacacaatgttgattttctgtaataaacacaccagcatttagatattcaaaagactgttgtaccttttgatgcttcaggaggcttcatttatttattcatttacttcaagaaatattttgaggacctactactgtatgtggtaagcattaatctaagtacaggagatgcagcagtgaacacgtagcactaatgaaatatctagtcagaggggatagatgatataacaacagattgataaacaagaaaaatagcagatagtgagaatttaaattatgtaggataagaacatgatgtgtcaggaccactttaggtggagcagtcagagatgacttgtttgagcaggggatgtggaagtggatcagccatgtgccaatgaggggagagcatcccagacagggcagttagtgcttggtgtgcttcaggagcgccaaggatgctggcatgggcgagaggaacctatttgtaggggattacaagagctcaggttttattctcagttcaatgaaaagccaagtagggtagctaagatgttgacatactttgctgaraatttactgtggctgctgtgtggagaatgggattgcaagggggtaagtataggatcagagagattaattaggggactatggcaacaatccaactgagagatagtggggtttggaccagggtggtagtaatggagatagaaataagcagattgggatataggattttggaagtcaggttgacagaacttgactgcgcaactgaatgtgagagttgaaggaaacagaaatttagagtaattcctacgtgtttggtttgagtaactgtggaggtgatggtactccatatgtgggaaaactggcaggaagtaagatgaggcaaggtgagatgggtagggtcttaggaattctgttttcaccattttaagtggtctagatatccacgtggagttgtcaagtaggcagtttaatttaaaattcaaaaggagatctccatttcccgttgagaagataagaaataagttggggctaagttttgggtttgtggctgaaattgttaaaatgtctatttttatatgatttaacagtttagtaacatgtccatatttaaaatcacatcagatatgttaacttagacatattgcttttttcctgtcttatcttttccaaacagttttatttgaaagcttcctatgcactgttggcagcttcacatgcatttttagcatcagtgtctttggcactattagtgcaattctgggggctacataagcaaatcccagagtgtgtcaccttcacttctaaggttttcagatactgaattattttaattaatgtatgttgtcttcaccggaaattttgtcctaagtcacagcatgcatctatgaaacattaggacaattatatgtttttaaaaatctgtgtaggtatatgcttgtgatttgtacartacacttacctaccacattgcttttgtgcttcttcaaatttgtaatacctctttattagaaagtcagtcaattcataaggccagtgakgttgttttcctttaaattactcattggatatttttaaatttattttttaattgacaagaattttatgtatttaaggtgtacagcatgatgctttgatgtatgtatacattgtggaatggctaagtcaaggtagtttacatatgcattgcctcatacttatcgttttttgtggtgagaacccttaaaatctctttcagcaatttttaaatatacaatacattattattaactatagtcaccatatttacaatggatctcttgaacttatttctcctaaactttttggagacttttataactgtattcaactcttgaaattataaggggggtaatatttttatcttttcattttgaccgattacattctagatggggtatcatttcagagtaatgtatatttaacaaataatacatcattgttcaaaatgaaataattaggggaacatcccataaatgaaagacttagtaaagactcagaaataagacagtgtgttcttttcaaactcttttacatcttctgttttcacttaattaattcatatcatacatatcagtacatataattatgttttaatgtctgcctagtgttctcttgtataagtgtgccatgatgtatttagtcagccttctattggtgatattagtttgcttcttatctgctrtagcaaacgtacttactatatacagtaaatacccttgtatttcctttgtcacatgtgtaaaatctctggaacaaaggatacatacatttaaaatttgttagatattgcctatttttttttatttttttttttgagacggagtctcgaactgtagcccaggctggagtgcaatggcgcgatctcagctcactccaagctcagcctcctgggttcaggccattctcctgcctcagcctcccaagtagctgggactacaggcgcccgccaccaagcccggctaattttttttgtatttttagtagagacggggtttcaccatgtagccaggatggtctcgatttcctgacctcatgatccgcccgcctcggcctcccaaagtgctgggattacaggcgtgagccaccgcgcctggcctaagtaatatcaattgttactacaaccaaaaactttggagagtgactacatccctatactatctccaaaatagtacattgtcaaacttgtttatcctggacttttgtttggtataaacagtcaattatgtcattgtagatttgagattacattgctttttgtataggcaaattatttgaaatatcctcagttatagcaactttttatcttttgaaggtaagtttgagttttctaaagcgtcatgtcttatcagaagatagagaattaagttagctgttaccataggtttttttgtttttgttttatttgttcattttgggaggaggagttagtgagaaacaaggtctaatttttagataaaattagtatttttatttggattataaattgtttcagaagtttgtttcaaaagaagagttccaaaaatgtctagagtaatgacaccattaactggtgtaagactacagcgttctaaggggaattatttgaattgaacaacatgctttggattgtgtatgatctggtatgtttgttttaaaaagtcacctactgtgatggctttagctcaaatgagtttctttcatagtagggtacattaaaaacataaatgccttcagttttcttggactgcagttttaaacttagataaagcctactttaaaatagtcatagataatctagaaaaatagatcttttttaccattattaaacaaacattattgggataatatttacagaagtctgatttttctatacaagattaaattatttgtttctttcattaatccttctaaacttatctacttttgcaatatagatataactatctaaaataggcatagtagcaagccaaatttagacaaatatttgttttagttttcaaatatttaacttcagaacaagttatgtgttttaaacatcaaattaatgtgcatatttatattttcctaaaactattggcaaatttagtgtcttttactttttaatataagcyaattttgagagaagcakactttatgcttggtatgctgcaatcagatatataaagttatgtatatagaagtcagcctttattaagatgttcattaaagcaattgtcctctattgttttccaaaataaaattgtcttttttttttgagagagtctcactttgtcacccaggctgaagtgcagtggtgcagtggtgtcatcatacctcactacagcctcgaactcckgggctcaagcaaccctcctgcctcagtctccccagtagttaggatcataggcacatgctatcatgcccagctaattttttaatttttcctagagacagggtctcactaggtttcccaggttggtctccaactcctggcctcatgcagtcctcccacctcagcctcccaaggtggtggaattacaggtgtgaaccactgtgcctggccaaaatcatatgtcttaagtaaaccatcttgtttttattttctataacatatcaaattattatctcatcagtttaccatgagaagatgtttaggagctctcaggcatagcacccttcctcttcaagtatctaatgtgtctgcacgttctgttctgcagagaaatggtcaatgcatggtttgctgagagagttcacaccatccctgtgtgcaaggaaggtatcagaggccacaccgaatcttgctcttgtcccttgcagcagagtcctcgtgcagataacagtgnccctggaacaccaaccaggaaaatctctgcctctgaatttgaccggcctcttagacccattgttgtcaaggattctgagggaactgtgagcttcctctctgactcagaaaagaaggaacagatgcctctaacccctccaaggtttgatcatgatgaaggggaccagtgctcaagactcttggaattagtgaaggatatttctagtcatttggatgtcacagccttatgtcacaaaattttcttgcatatccatggactgatakctgctgaccgctattccctgttccttgtctgtgaagacagctccaatgacaagtttcttatcagccgcctctttgatgttgctgaaggttcaacactggaagaagtttcaaataactgtatccgcttagaatggaacaaaggcattgtgggacatgtggcagcgcttggtgagcccttgaacatcaaagatgcatatgaggtaaacaggggagcatgagagcaggaccagtgctggggaggggactatggctggggcgggtactatggctggggcattggatagcaatcatgaatggtggggatatttgaaactgagatgtaataatttgcatacttatttaaaactggaatgtatgctaagaattttcccatctttaaatgccagagtttctttcctggtggttcagttgaggatatgagccttaaggaaatctcatcttgtttttctccttaatgataatttaatatagctcatctcatggttatattctcccatctttttatctgatcactatacatatccccatctatgttatccccacatgaacctcttaggattttactgagattctaaaatgataggtgcaaaaacaaaaaaaaactcatagtctcttttcattcattcattcaattaatcatattcattcaaagtcccattgataccaaagtctggttttctttctttctatcctctctttcattttttaaacagataaacttacagatgtcttcaaaaaaatggaaatttttgctctaaaagttttcaatggaaagatttgttatttcttctacttttgctatacctatgcacaagtctttaattaagggcttaaaggttacactgtaagattcttcaaatttcccatttaaaataatcctttttattaatggaattttagttttaaaaccaagcatcttaactgaatggcactttatatgtttatgaggtatcttacagcatcttgatagaacaattgttctagctttctactgtgtggtacactataaagattcagtggtaattctggcttagttcatttaattcagagagtcatagctgttttattgtgttcctggtgccttatagtgcctggcacatagggcttagtaaatattggttgaattaaaataatagtacatgcaatagataaatagcatagagagcaggtcattaacagatgccaagaaaaatgtgataagcttcagagaagcaggataggacatctagtgggaaagatagagaaaatttctttttttttttgagatggagtctcactttgctatccaggctggagtgcagtaacgcgatctcgactcactgcaacctttgcctcccagattcaagtgattctcctgcctcagcctcccgagtagctgggattacaggtacccgccaccacatctggctaatttttgtatttttagtagagacggagtttcaccatgttggccaggctggtcttgaactcctgacctcagatgatcctcctgtctcagcctcccaaagtgctgggattacaggcatgagccaccatgcctggccagaggaagatttctttgagggagcaatgtctggtacagatcccggaaaatttgaataaattgaataaattgagatttgtgcatggtgagatccagaggtaaagagaagttagaagagataggcaagtaggaccatgtaagtgtgtggataagaatctggacatgaaggagctgtgggagcacagccaggaaattagaggtcttgaatgccaggctgaggaatatatatttggtttagaaacatgaggagtaactgaagatgttttgaaaggggaaccagtatgatttaaattgtgctttggaaggattaattttacagtagtcataaaatgaattagaggggaaaatgctacaagttgggaggatagaagattatcttaatagtctaagtaagtatgaggaagtaaggaccttaacaaggaccttggccttaaagatcaaaaggagggaatggatttcggatgaagaagtattaggttggtgcaaaagtaattgtcattacttttaatggcaaaaactgcgattacttttgcaccaacctaatagaatctgctgaacttggcagctaacaggagatgcaagtgaagggaaaagaggagttgaagatgacccaggttttgaagctgggtaaatgaataatggtactactagtgagtaataccgagggccgggatttggggtgtgatacttcatctaggttaagtcctgaaatgttttttcagaatccattctatataagcaatgtgttcaattttgattctcttggaaaaatttactggtcttcatagagtatctctatgacctctttgagctctgtaataacttcacactgtagcagattccaagaggggtattaaggacacagctgaaggattgctgccaagtttgcagaatccccttcctgtcttaagtgacagctgggtatccacttttcaatggcactatggtcccaagagtacagtaggatcataaatattctctagctttgttgagaaagtctttatttgtcttcatggtcctaagtgtctccagccctgagaattcttcacttatatgtgttttatttaatctgcctaccatcttcaaagttttgacaatgtattttctgttktgcatttgataatgatttaattcttgtactattgtttaaaacagctagtgtccttgatttgcactgctcccagggtgatgcctcttascctgtggatttgtcatgttgctacttcacatttggtacccttgatctgtatttatagtagccttgcaggagttatttcatgtcccaagaatttcattagaacttgtgggggttgatctgtgatctaatttacattgtgatctaatttatattgatattagcagtggaagtcagttggctaatggataattcattactaagcaccatccataatttgaataattaaaatactatgttttttgaaagtagtcaggatatgaaaatatattctaatgttttctgagtcctagctctttaaacatgcatctgtaaaaatgacactgtatggcagtrtttcttaagcttatttgatcgtagaccactttaaaggatgtaatgtcactgtgggaaaccaagagaggtgtctgtgaaacagaataatactcagattgatgctgagaattttttttaaagtctcataaagttaattataacaaatgacytatatttagttcacttttaaaactttgtaacagaaaatgatataaactgatataaatttgaaaaattctatagttttattactgataagaaaacatattcgtatattcaaaatacaagacaggatccactactcagaccagtgattctcatgtagacccataaataccaatgaaaagattagttggtaaatgctacctgtacattgatgttcagtcacacayggtctcatgcatcagcccaccatcatgcaactaccttcaatgtgccacaccatgtatgtatgtatgtatgtatgtatgtatgtatttattttaagccagagtctcactgtgttgctcaggttggagtcctggattagctgatccactcacttcaactgcacgagaagtggctatggtcctgagtaggtgggaccacaggtgcatgccactgcagccggcttggcacggcatttatgaataacaagaagatattaacacatttattaataagatattaacacttatactaagaagctattaatagtaagatatataatcagaactactatataaatgtgcttggtattttccttttataggaaaaccagataacatccaataactacacaggattgccctgaaccccattccatgtcctgaggaagtcttaaaccttcccatgattcatatgtcttaaggatttacattgtcaaaacatctctccttctcccaagtcaattagagtgcaaaactcagactcatgtcctgtttctactccaggacagwcactccatgtgaaccatgatttctagagagaaaacttagagggtcttagggaagggtcaaattgccacttatgtggccttgaccatgtagctattattccttccttccccacttcatctttccctttcatttttatttctccagagaaacaaattttcaccttctttcaccatgcagtttcttactttctatttcaactatttatcaatatatttttctaaagaaatacgaattgtttcaactgaatttcagatgattatttccagatgaattttagaagaaaaagaaaacccctagcaattgttgtaatttagacaaatctcctaatagaagtgtaactgtgcccctgggaacacagtttgggaactgctgtgtctatgcttgttcaatgtttcaggcattgtcttaaaaattccactctgtggaagaaaacmagccttataatttgtcaagtcatctgtgttgtttcctttttaaaattttctgttatttttattttgatataattttaaactcacagaaaagttgcaagaccagtataagaaactgccatacaccctttacccagattctccagttatttttttgccccatttgctttatcgtttcctctttttcactctataatgcatataaggaatatatgcttattatttctgaaagatttaataagctaaagatatgtttttactaaatagttcagtgtatattttctaataagaatattctcttgcccagccataataaaattatcaaaatcaggaaattttatattgatagaatactattatctaatctgatacaagactattaacagtccatagtcaaaatttcatcagttgtcccatcctattaataagctttagagttattttcccccaatccaagatagtattcaggatcccatattgcacatagttgtaatgtctstttagtctcccctccatctgaaacagtttctcagcatttctttatctttttaaatttagacattgttaaagggtacaggcctgttattttgtagaatgtccttcacaaatagattcaagctaggcccttttagctggaataccatatatgttaatgctgacaccttaactaagcaacgactatttaattttccagttctttgacactgcaacccagttcaacccaattcagttctgattcttaacctcatggagttagcactgaccctacatgttaagggctcaatcccacaagcctgccccgacttcagacgtcagctgcaagtgggatccctaggctaccacacttcttccaggctgactaccaattcaaggattctagtgacccccgcttaggttcagtaattagatagaatgacccacggaactcaagaaagcactacacttatgattacagttttattaaaaaggttacatacaactcaggagcagccaaatggaagagatgcataagacaaggtatgggaggtggcggggggtggggtggtgtgcagagcttctatgccttctccagaatgccagcatcccagcacatcaatatgttcaccaccctggaagcttccctagacctcatttttcccagctttttattgaggttttattatgtaggtatgattgattacattattggccattggtgagtggattcaatctccagccagtctcccctctccagaggttgggggtgggactggaagttctaaacctctaatcacaaggttgggttttctggttcccacccctaatcctgaagccttctagggctcacctcattagtgtgaattcgggtatggttgaaaagggcttgttgcaaatatggaaatacactagtatcactcaagaaatcccatggcctttaggaggtctgtgtcaggaactgggaacaaagatcagaaacatgtttaattrtaccacacaccttcgtagtgtatcttataaggaggcatatttatgtgatgtaagtattgatgatgttaaatttgataacttttttaaagtgatatctaccaggtttctccaatagtttttcccattgtaattartaagtatcatatgggcagatactttgagactgtgtaaatactgtgttcatcaacaacctattgaccagctttagcatccactgattttctaactccatcatacctcttatatttattagctgaaattctaatgtaagagagagttttgccttctccttcattcatgcattcacatcaattatggactcgtgtaatattttatttagtcaattatgttctcttattatctttatgctgatgttcaaattataacaaatttgctgagtcctttttgttatgtccttattaattttggggcatttttttcactttctggctaatcagaatgtttgaggcctatcttacactttccgtgccctagccctagaatcattcttttttcccaaggagccctggtttcttttagtgaggggaatggtattaagaaaccaagattaaggcactagatgtgcttattgttgctggtatattagcagacagagctaggaaaataacatataaatatacatacgcatctatattgtatttatttctgtatctatctacttattataataaaaacaactgaattcatactgatacttccaatttcatccaacaactaaagatgcattatttttctttttttcctctattgggtgtttcattctccaaaaatgaaagactaggcttccttactctttttatatatatatatactcatgtgctcaagccacatttctagctctttctagattttartatctttctctttagactacagaatttcctttcgcacttcttatagtacatacagtgctgacaaatactctcagttttagtttatctgaaaatgcctttattttgcctatattcttgaaggatattttcactggatagatgaaccactatcagttgatagtagttttctttcaatattttaaaaaagagttttctcatttttttcttgtcttcatttttcttgggagaggtcagccatcctttgtatcattttcaacttatatgtttcaccctacatatcattttcacaccatgtgtgtaagcttaaggttttcatcaatttgggaaatttttctttataagtctttaaatatttttcagcttcattatctttgggactccaaatatatgtatgtgtgtgtgtgtgtgtgtgtgtgtgtgtgtgtgtgtatacacacttgatagtatcctaaaagacactgaaactttgttaatgttttatggtttgttttctctttcaatccttctgaatggatactttctgttgatttatcttcagagtcactgactcttcagctgttttcggtgggctgttaaatgtattaatgaacttsgtgttttacacactatacttttcagttctagaattttcatttgactattttaatagttttttctttccttgcagagattcctatctctgcaaagaagttattactatatttttctttaaatccctacattaatttttaatagctgctttaaagtccttatctgtgaagtccaacatgtgaatcatcttggggtcattttttattgactactttttctctttactatgggtttcattttcctgtttctttacatatgtggtgattttgtattgtctgctggtcatagtctgtttcactacatttggattatatcctcttcctttaaaaaagggatgagatttgttcgggcaggcagtaaaattactggcagattcttttgatcctgtcaggcttggtcttattatttgtcagagtggatcttttgaatttagtcttagggagtacccccaactatatggtatagtccttactcctaaggagtggtcttttcctgcctcaatgcctgcgctgctgaatgaattctctactctggctgggctggaactccattgtctccaaacacttcactaattggtgtcacattcagtttttagccttcagcaggtaatttttgctagtcctttaggttttttgccctatacatgcccaaagtgactagaaactcagtatcttttggtcactgcttcctaaccatcttccttccaaccccccagcacagcccctgtgctttatactttccaaccacttcagaagtttggagctccattcarttctgtttcaaagcgttgctctcattgggtagcacctgccttctctaaagcaggaaaacgccctcaggcagaaagccagaatgttgaatggcaattacttatgttgtctttttctttgctctgcccatggctttgttgtcttgtattttgtctagtcttatagatgtcttcagcaggaaggaattctggtacctgatactttgttatggcaagtggacatccaaggcttgtgttctttcatactgtcatgttcttgtaaacaaacagtgaaaggaataatcacaatgattgtagtgttccatttttttctttgatgtttactggacctagaggggttagaactcctttatgtatattgtctttgcactgagtacattgttaaaggagaactccttgagatgtcaggagtttggaacttcacctcaaatgaaatttgaaggatgtatttattcccaccctcttcactggagagtgaaattcagaactgctgttgattttaaactaacagtagacacaaaaaatatgtgaaagtcctactaaatttaatctgtcaaactctactgctttgattaggtagttgggttaagtcttctttataaattgtctcataattcaaatgtttattaacaaagtaacactgaggatgtatttttattcatgttttacttattggtttgtaaaataattcactatatatcaataatttttcacttctttaattcatcaacattatcttgtctgctttctttagacaatatctaaagataaaataagaattttattaggaagattcagctaaagtttttctctgcatctcaattcatataacwttgagcatgtttgcagaaaaagcaaaaatgtagtagtgtttataatataaaatatttatattgatttttcaccattttatasctttkcttttgaaattatctttaagctaagttgggccctctcagttgaaaattggcctcatttctgaccccaattgatggaatctagtgtaatcacttcattcacagctttactgtgactaatttattttttatttttttaaaaagaaatgaccttcaaagctcatcaaaagatgagcttttccagtgtggatattccatattctctgaagggaattccaactgcgtagtttttggagcagtgatgctattattagrttaagcatgtaactccccaaggctatcgctttgaagggaacagcactcattcagatgtttatgtcctggaatgcttgattccattccactctaacctcatgttgttgtagctattgatttcctctactttggttttccctttactgacaagatttgctttaaactatatggtaaggtaaaaatgataacatttgataaccgtggtattatttgttaatgaattccttcattgatttaacgcatgcttttgattgagttcctgtgctaggaatacagtaatgaacaaaaaaagaaaaaaaaaaaaaccctcacagagtttacagcctaatttgagatcttcccaatctaaagtgtaatggaaaattaaactttacctttgtttctttaattcatacttagaaatttaacacctcagaagtcctttatgattattggrtgtgtataatgtgccttgtaaaaggggaaattcaaaagattaaaggattgtttacaatctgactcaatgagattgtgtatatatgtgtataatttaaactcttaggaatacttgagatagaagtacagaatactgaagaactgtaaaagagcccttacaagggaagtaaagtcatttattgaaaaggttgttctggaggcacaatagaatcaggttgtgagatgatattacagaggtggagagatgccactttttcctgaatttwagtacagctatctaaagtggttaatattttgaattttctttatttctgaacatttgttcgagtctgtatttttttctcttaaacactagctgcttataaaaaagctcagcaacttcaatttatctttgtcaaatataatatgtacttacatgatgatgcctttcacaacaataaaattgttactcagagtaacaaggtaagtccaaggttagatttctctaatctaataaatcagaaaaatcaaatcaatctttgaacaggtcagtcattaaattgaatttctttttccatactaggatcctcggttcaatgcagaagttgaccaaattacaggctacaagacacaaagcattctttgtatgccaattaagaatcatagggaagaggtaagccaattttccattttataaaaggtcattggaaatatttttctttttgaaaaatattttgtatttactttgcatatatatgaaataatgctttagtgacaaattagctataaagttcttaaatgttctgcttgattttttttctatttagatttttagttacagggcctaattctgataattrctttactatgcccatttacttagaaataaattttatgcatgtcatattctacctcccctcttcctgaaggcgttattctatcttaagatatgtaattatggttgtgattaggatcaattcattgcatattatgttttaggagtatgagtagtattcataaatgctcatccaactacagtggtcattaacggatttcattcaaattgaggttttgaaaaaaatggaaatcatagctaattctaattatgtaaatttcaatttgaaattttaacaggcaaatgaaaatatgttagtttatatttcayctaactagaagatttggattctgttatcactgaattccctcttcattttacacttatttggaaaaaagagttaataaattatcagttaaactgaatatttcaattgagcattctcaatcctgactgtgtattacaaccaactggagaagtctaaaagattaccaattgtattaattggggttctccacagaaacagaatcaataggatatatgaggatatatgaggggatttatttatggaaattagctcatgcaattatggagaccaagaggtcccacagtctgccatcttcaagctggagaacaggaaaacctgtggtgtaattcagtctgaggctgaaggcctgagaaatgggagatttgctggtgtgagtcctagaatccaaggatctgagtatttgaagttctgttgtctcagaggagggagaagatggatgtcccagcttccgaagagagagcaatatatgctcttcctctgcctttttgttctgtytgggcccttagtggattggatgatgcccacctacattggtgagggagaatctttttcactcagtctactgattsaratgctaatttcttctgggaacaccctcacagacacacgcggaaatgttttaccagttatctgggtatagcatttaaaaattctaatgccgaggtttcaccttaaatcagaatctcagggattgggacccaggtattagtatttgttaaagctcccaaatgactgcagtgtgtggccaaggttgagaaccactgccaatcatattagaagtacttgatgcttctacttgatttatattcaaattctgacatttattctccttcctccatctagtstgttaccaaaccccattgatttttttcattagaatgtttctgatttcaatatttttttctttttattcgtgctacctgcatgcaccatgattcagattttgaagtaatgcctaaggtttttaaatgttcttgtaaggtgtttctatccttgcagtcaatttccctttagtccattctacatatcactgcctggaaatttgcctaaaacacagctttctaaatcagtgcttctaaaactgtgttgtgcataggaatcacctggggattttgttaaaatgcagattctgaattcagtaggtctgggtagaacctgagattcttttctaacaagtaccaagttgatgattacctgggtctgctgatcacaatttgattaacaaggccctaagtcagttacttctcagtagtcattctcagtgccttagagttgccacatggtttcttaaaaagtgtagttccagcagtagtaactaaaaatgcctgcagcaatgacgtaatatgagattaattaattagtttaattaactaagtatgtgaatgaatacataaaattgaaaaggccatacatggactgatcattattgtgttattaatatggttgccaggtatatcaaatttttaaagaaatgtgtcccatgcattatttgggacatcattatactaagaaattatttgttgtttatctgaactcaaatccaactcaaatttcatctggcaggcctagttataaaccacagactaagattccgtgcacttaggaagacaatgttcagcttttagttattaaggatattttaaaatcgtggcccccaaaacagctttgtaccggcaaagggattcagcytgaattatgccctgattaagcttctctttctagatagygtgaacaatttctccaacagtcaggattgggggaactgatgagaatgcaacagaatcactaggaagaagtgagtaggatggccctttctacagaaagtatcctcaggatatacattcttccatattatgactgccggtgaggatgatttaaattaaataaaaaattaaaaaaacacagctatrttgagatataattcrcgtactgacatgatttgtctgtgtccccacccaaaatctcaccttaaattataatccccataatccctacgtatcaagggcgggaccaggtggaggtaattggatcatgtgggcgttttcccccatgctgttcgtgatagtgagtgagtctcatgagatctgatggttttataagcatctggcatttcccctacttgtactcacaccatcctgccgcccaaggtgtctgcttctcctttgccttctgccatgattgtaagtttcctggggactccccagcaatgaggaactgtgtgtcaattaaatctctttcctttataaattacccagtctcaggtatttcttcagaacagtgtgagaacagattaatacacatataatataatttacccagcttaagtgtacaatttgatgaatttgagatatgtatattcgatcatgtaaccaccactgcaatcaagatatagaacatttctgtcacttcaaatgttcccctgtaccccttcrtagttgatctcctcctcccttaacccacagctcctgacaagcactgatctgctttttgtcactattgttttgctttttctagaatgtcatttaaatggaatcatacagtatgtggtcttttgtatgtagcttctttcacttagcctaatgggtgtgagattcagccctactgttggatgtatcagtagtttgtacctttttattgctgagtgatttattccatggtatggatatactacaatttgtttatgcattcatcagttgataaacatttcagttatttccagtttgtgtctattacaaaacaaagctgctgtcagtgtgtttgcatacagacctttgtgtggacttatgctttcacatcttttgggtaaatacataggagggcagttgctaagtcatatggtaggtatttatttaatttgataagaaacttccaaactcttccaaagtagctgtaccatatttcattcttatcagcagtgtatgagagttccccttacatcacatccttggcaacacatagtgtatcagtctttttaattctaggcattctactgagagatgatttaaatttcattacatgaatatgtaaccccactcttagccaaggacctgctgccttcttacagatctgattgaagtgggtttggccacagatccccaaatagcccgaagctctctcctttagacttctgctgggttcctgagctttctcatgtctctctctgtgctctcacatcctctcctgctggtgtctgttttaccttgtggtgacttaatatgagccttggactcttacactaagcatttcatgagatgaaaaaatcttcagtagcttcactggggactaaatacagattgagtatacctaatttgaaaatccaaaatgctccaaaatgtgaaactttttgagtgctaacatgaccctcaaaagaaatgctcattgaagcattttggatttttctgttagggatgctcaactgataataatgcaaatattccaaaatccaaaaataatctaaaacttgaaacatttctaagtcccgagcatttcggataagggatgttcaatctgtaactttattcaagagagggcttccagaacacagctttttttttttttttttttttttttttttttaaacagagtctcgctctgtcacccaggctggagtgcagtggtgcgatctcggctcactgcagcctccgcctcccgggtttgcgccattctcctgcctcagcctcctgagtacctggaactacaggcgcccgccaccacgcccggctaatttctttttgtatttttagtagagacagggtttcaccgtgttagccaggatagctacgatctcctgaccttgtgatccgcccacctcagcctcccaaaatgctgggattacaggcatgagccaccacgcccggcttttttttttttttttttttttttgagacagagtctcactctgtcaccaggctggagtgcagtgtggtatgatctcggcccactgcaacctctgcctcccgggttcaagcaattctcctgcctcagcctcctgagtagctgggactacaggcgtgcgccaccacacccagctaatttttgtatttttagtagagatgggatttccccatgttagccaggatggtctcgatctcttgacctcgtgatccgcctgcctcagcctcccaaagtgctgggattacaggcgtgagccacygcgcccggcccagaacacagctttttaaacatcttgctgaccctccccattctccttccttctcatcttgctccctttcctcccaggttcacactgccaagttcaaaattatttctcctgagaattaacgttttcagagaaaagaatgaagagagacagaacagacacactatcaagcgtggctgttataatataaaaagtaatttggctggccaaaaaataaacccaggccactaacaaggtgcaatatttgacttccagaattatctttaaatttatatctgtataaacaaactcagagtagtgtttgctttttatgtacacataactactctttgtcgtgaaaattttaaaccaaaatggaaagttgcagggaggctttggggactaattattaagattgcttgctctgggcttgaatcccatctttaccacttagttgctggctgacaaaccaggatggaactggttaatccctttgatcttcagtttcctcatctgcaaaatgagggcaataaaaggatctrccttaaagggttattgggaagattaaatgcattcatgtgagtgaagggtttaacgtagttcctggcacactggaagtgcatcagctactattctttaaaaggagatgtagaactaatagagctttaaagagagacaaggaataagagctgcatgaagaggtcattagccacataataatcagctaactgggaccaaagccagtactcagctaactgggatcccaacacagcccctgacatagtctattgattaccctctaagaaactttaaacttaagagaaacatgtttttctctatttttcctcataaataaggcaaaatgaatttggtgttttctctttttctaagtccacccttatcgagtaagccaatacccattctgactaattaccaaggaacctaaaaagaactgtgattattgaatcattaaatattgattgtttacaaaatatcctggtacctttcagtgacactggtttttaaagacattggtaccaactctggaaagctgttttaatggagtagttgactrctgaatactaaagtctgaattataacataggccggaaaatgcaggaagatttttaagattcactgaaatatctaagctctttatttgcctcttattcttgtaaagtatttcaactaattaaaaatgtttgggagttcttttcattaatgttataaccataactgttatagatacagcagtgctttttttacaagtaaggatcatagatattactaaacatctgtgatggtaatttttgaaaaaaatcatagaggttaagtttttgcaatcttcccctctccctactcccttctagagaatggagttaatgggcaaagtggaaaaagaaactggagaagtgttagaaggctaaaataatttattttggaaggtcaaagagctactggctggagaaaatgaataaagacagaaagaaaaaagtgatcaagggagagaagagagccagtccagagtgtctatgagggagtagtttgaggagtatggggtaggagtttggaaataactgccttgtatgtaggagacagtaaacatgtgtgatatttattaagcaaatcttgtgaaaactgtgctaatgatctggcaagtattagttcatttaatcttcatgacaaccataagaggtaacccattatcttattcctacctaacaaaaaaggaaactgagacatgaaacatatagggaacttgctcaaagtcacataactaaaaactggcaaagctgagattcaaacccaggcattcggactgtaggggtcataatagagagaagagcatttcttaaaagtctgctatggatgatggctgcactctgcttccctcctgattggtgttttcttgagactctgcagtaagcacttaaattattgttgattttgttggagtggaaggtacactgatgtgtttaatgtggctacatgcagaagcaggacttgaggtggcaacaaggagatctgcctgtattctgctggcccttcaatgttagtgtttaaaccgctctgcagacagactttttaagatgaaaaatgagatgacagagaaaaagagagagatcatagtcacatcctctgtattgccttaagaggaatttataagaaaatttttaccagagataaaagagttacaggagcatgtttcatactaatctgagccaatctgctccagagaagaaccatgactacaaatgaagcataatgaaaaaaaaagttacaggtatgtgaatttttayggctgctattaaatttatttcaaagttaattctggatttttcagacctgggcacttagaccagtttttatctttgtcatttgtattaattatttctataaccagacagaattctttttttgtttagtaaagaattacagagaagctcagatctttccccctagctcagatgacctgtttgtgaaatactgccctcccctgaagtattgcttgttctgacatagtgaagatgagtgttcttttttatttatagtggcttcactgatataaccaaccctaaatattaactcttactcagagccctatttgtcactctgggcctactgatttttttttttctctagattatttggggaggagaggataaggggtagaaagcaggactttatgaaataatgcaaatttcttatttctctgaaatttctctgaattctctgaattmtctgaaatttctctgaattcctcaagaattttctctgaaaatttcttactgatatgaactagagattatatccaataatgtctttcaggctaggctgaaccaccattgttgaatgtcaactccagttattaagtagaaattcagtttggaatcagagctctttcctccttctctctttttatcttatcatcttgattttattttatcatacttagtgatatacttgcaattctttgatgcaaatatggcagttaaaatcaaggatttaggataaattcattacaacgtggtaaaagatcattttagctaatatcttagcattttagcgtatatcttccttttaaaaactaaaaagattcaaaaagtatcagctaatttttatgagatttatactttggcgaatccaagtgattaacacctaccgaaaytcataaattgaggcattcatgaaatcagatatgtaattccaactacaaaatacaaaaataaatgttttttagaatttaagttttatgattgtgtctgctcatttaaaaatattttcatttatttctcctaaattatcttgttttgacaagtaactgctgaatcactgcactttgtagattcttttttttttttttttaatgaagcaaagaagatacttgcttttaaatttttttcaatttggagaggtaggctaggcgcggtggctcacgcctgtaatccaagcactttgggaggctaaggggggtggatcactcgaggccaggagttcaagatcagcctggccaacatggtgaaacctgtctctacgaaaaatacaaaaattagccgggtgtgtggcatgcgcctgcaatcccagctgctcgggaggctcacacaggagagtcgcttgaacctggctgggagacagaggcttcagtgagctgagatcgtgccagtgcactccagcctgggtgacagagtgagtgagactccgtctcaaaaaaaaaaaaaaaaaagaaaaaattggagaggtagctcttgtacaccaaaaattaaatatctatataaggtgacaagataaatgttaaatgagtccaatattcaacacacaagttcgaaggaaagactgaactagggaagctagagaaatccctggggagagatgaaagtgccctgctgtgtttatctcacagcctcaagagaggaaccacataaatgctcctgatgacaaatacttgatctccatggagtgtggaggccaaggagtccttgtctatgatctctcacactcacagtactgactgccgctttcttaaatttggcaagtaaacttggaggaaataaatgttacagttttattcataatccttcaattttcagtcaaaatagatgaaaatataactgcaaaaataagcagagtttaatagcagactaccagttgatctagatctattttagtgttaaagaattggctagttacatgtttttgaaaacttagaaattggccaggcatggtggctcacacctgtaatccyagcacttggggaagtcgaggcaggtggatcatgaggtcaggagatcgagaccatcctggctaacaaggtgaaaccccgtctctactaaaaatacaaaaaaattagccgggcgcggtggcgggcgcctgtagtcccagctactcgggaggctgaggcaggagaatggcgtgaacccgggaagcggagcttgcagtgagccgagattgtgccactgcagtccgcagtccggcctgggcgacagagcgagactccgtctcaaaaaaaaaaaaaatacaaaaaaattagccgggtgtggtggcatgcacctgtaatcccagctactcaggaggctgaggcaggggaattgcgtgaaccagggaggtggaggttgcagtgagccgagatcttgccactgcatgccagcctgaaaaaaaaaaaaaaaaaggaaaagttacaaattgttcactgcatttattccccacagtattctttcttgtagttttgttttagaaacaaaagtgctgcgcaragtttctgtttgttctggacttgaggttgtgatagtgacaatcctttctttttccttctgcacactgccctttaaataacaaagtatatattatgaagatgttaactgctttcctaaaagaagaatgtttcttaagagcagcagatgaaaaacactgtgctaatatgtgaaatccccaagtctacattactgatcaagaagaaaaagaaagtgaataaaaacttgaaactgaagattaaattaatgtggtaggctttgtgtacccaaatggtatcctatttttaatgataagaaaatttggttcatactgagtgctatattttattcaataggaagcttatcttcattggtaatttcaagataaccattccagcactttttggaatgcattacatttttaatttaatagatgatttataaatttaattttgagaagttttacatagtccctgaataatgggtattaggggtctggaaccagagaagtataaaacatttctttgtataatatctaacccgacatcatataattgcaccctggggtgaattttgactataaaataattttcatgttttcatgtattcttgaagagttaaggtgattgttaatgaaattgctgctctcaatagataygtacaaacatctatactcatccattaatgtctaagattccataggtaaagtgctttatcaagtgttaaataccctgtattccttgttgttaaatgcttatctaaaaatctccatttgcttctcttctaccatagaatggaaattaatagtctatgctaaatctccacttgcttttgatcatagaatggaaattaatagtccaggctgaatgtaaatcaaagagcaagagatgaggatcttacaaaaatttttaaatttttttgcatcagtttatagtaatgaaatggagtgaaaatgacctggatttagaagtctagatctatttgattattacaaattatttgataatcatgagtactatgccgtattggttatctcttgcaacataacaaattacactaagtgattctgaacaaacatttattatctcatagtttttgtggttcaggaattctggagtggcttagcaagcttggttccttctggctcaggtatctcacgcggtcaggatgtgggcaggggctgcatgacttatgcttgatcatccattttcaagaggttcttgggagaaatgcttcattcctcaccatgtgggctcttcataagttgctcagtgtccttacatcatggcagctgacttctccagagtgagcaatttgagaaaaaatgagcaaggaggaagcagtagtgctctatataacctcgtctccaaagttgtccatcactacgactttcccggcgttctgttctttagcagtgaggctttaggttctacacccaactcaagaggaagggaattaggctccagctcttgaaaggagtagtatcagagaatttgtggagacactttaacctaccagacatagtactaatgtactttcattatttattatatagaacatatatatccatatttatttttctctttccttaaaactagccagaggataaaagaggaactctgctcattaattaaaatgatctcttaaaatcattttgagttctcacctttcatgtactaaaaaatgttgtgaactaccagaggagaagcgatatagactgggtttacacaaaggtttatacaaaaattggtgttcaaggttgtcttaaatcagagggaaaagaggaagtagagcatgaaaaagggaacactaaggaaaaaagagaagatgtttgcctctttgtatggtggcaaactattgaggtattaaaagacttttttttttttttttgagacagagtttcactcttgtcgcccaggctggagtgcagtggcatgatctcagctcactgcaacccccacctcccgggttcaagcrattctcctgcctcagcctcccgaatagctggaattacaggtgcccaccaccacacctggctaattttttgtatttttagtagagatggggtttcactgtgttggccaggcaggtctcaaactcctgaccttgtgatccgcccayctcggcctcccaaattgctgggattacaggcgtgagccaccgcacccggccaagacttttaaaatattatgccacaaatactaacagttctacataagatctctgtttgcacgtaatataagtactcactacttaatattcacagggaatgctcattggtctgtctctattatatctttctgcaccatcgttttctgcctctgttgacagactgagagcagagggaatatgtctattactttgctacactgtttgagcatccactagaaggagggaagtgcctggaaatgaggtcagacaggtagacagaggcaagatcaagcagagccttctaatgtcatgcaaaggaggtactgaattttttttaatgccaggaaatatttcctattgtttaaaaatctgggtggctacagcagtaagtttgaaccattttcttcacttctaacccagagccacataatttgacacttgatatattttgataattaacttccatatttgttcataagcagagagagtactttgtttagaggcaggaaagctgctaaagaggtttttgtggatttgttacacttctgtttagtaggtttagtgattgatttgatggaggaatgagggagagggaagaatctgaaatactttctagctttgtaggtaggttataaagggggagagttgtcatatttcctaaaataagtcattggtttgtggggaacaaaacagttagctctttttcttttgcatgtattgttttacagactaatcctttctcttctcccctgaaatctctacattgcctccccatccccgctttcagatgatggccttgcttactgtttcagtgaaagccaacacaattagaagaatatttccacaagagaacttcccctacttctttctcctgctccagcatctgagtccatatactctggttacccttttacttcttgggatgaactgtctgaaccagcaagggccagcctcccatttgtgcgccagatctcatctcagtttgcctagtcaaagaaattagctcagcagttctctcctctatgtccagaatcattaaagttttccctgctatcaaatctgctcatcagcatacaaacatgctgctatttctcccatctgcttttgaaaacaaaagcagaacactcattggaccacacatctgctttaccacctcatttctctgatcatcaccagaacaaaactctttgaaagagttatacaggccatgtttgccatttccatttccttccattctctcttgaacatacttcaccaaagctttcaccttcttcatgttcccctgtctctctccttctcctttggcctccctattccctgagagacaacagtattataattaagccagttgataaccctatagtgttctctaagtgttcaagtgttcactttaaatcaaaagctagaaatgaataagcttagtgaggaaggcatgttgaaagccaagataggccaaaaactaggattcttgggccagttagccaagttgtrgacacaaaggaaaagttattgaaggagactgtaagtgccactccaatgaatacatgagtgctaagaaagtcaaatagccttattgctgatacaaagtttgaatggtctggatagatcaagccagtcacaacattctcttaagccaaagcccaatccagagtgagaccctaacttctttaatactgtgaaggctgagagaggtaaggaagcttcagaagaaaagttagaagctagcagaggttgtctcgtgaggtttacggaaagaagccatctgcataacacaaaagtgcaaggtgaagaagcaagtactgatggagaagctttagcaagttatccagatctagtgaagatcattgatgaaggtggctatgctaaacaacagattgtcaatgtagactaaacagactactattagaagaagatgccatttcagactttcatagccagagaggagaagtcaatgtctggcttcaaagcatcaaaggataggccgactctgwtgttatgggctaatgcagctggtgaatttaagcagaagccagtgctcacttaccattctaaaaatcctagggcccttaagaattatgctaattcaactcagcctgtcctctgcaaatggaacaacaaagcctagatgacagcacctttgtttacagcatgatttactgaatattttaagcctactattgagacctagtgctcagggaaaatgatttctttcaaaatattactgctctgtgacagtacacctagtcacccaggagctcagatggagatgcacaaggaaatcaatgtcgttttcatgcctgctgatacaacatccattctgcagcccattggatcaaggactgatttctgctttcaagtcttattgtttaagaaattcatttcgtaaggccatagctgacataaatagagattcctctggtggctctgggaagagtaaattgaaaaccctctggaaaggactcaacattctacatcccattaggaacatttgtgatttatgggaggaggtcaaattatcaacatgaacaggaatttggaagaagttgattccagccttcatggatgactttgaagggtttgagacatcactgttggaagtaactgcagatcttgtggaaataccaagagaattagaattagaaatatagccagaagatgtaactgaattgccgcaatctcatgataaaacttggacagatgaactgttgcytcttatagatgagcaaagaaagtggtttcttgagatggactctatccctgctgtaaatgctgtgaatattgttgaaagacagcaaaggatttagaatattacataaacttagttgataaagcagtggcacgccttgaaaagattgactccaattttgaaagaagttctactgtgggtaaaatgctatcaaacagcatcacatgctacagaggaatctatcatgaaaggaagagtcaatccgtggtggcaacttcattgttgtcttatgctaagaaatttccacaacagccccgtccktcagcaaccaccaccctgatcattyggcagccatcaacatcaaagttaagacccttcaccagcaaaaagtttatagctagctaaagactaaggtgattgttaccatttttcagcaataaagtattttttaattatggtatgtacattgttttttagacatagtgctattgcacacttaagaaattacagtatagtctaaaaataacttttatatcctctgggaaaccaaaatatctgtgtaactcgctttattgccattgtctgaaaccaaacccacaatatctctgaggcatgcctacaaatacttcattgtatattaactggcacagctatggagaagaggtcatgtctttttttgctggtgacacctacaactaggagtttcgctagtgagacagatgtctgcatctgtgctttcatgcatgattagcttctcaggcacatcttccatttggagggaaaatattttgagatgaaattatgttttggctatgagaacataataaactatgttctccatatgaaggacttagaatgtaaagaaattatgtatgtacatatatatacacgcacacacacatgtttttcttgaatatcttatgttaaattatatggatatctagctttcagtggctacatatgtggttagctagaccagtagaggcaacagcagtgatccagacacttagttcagctctagtraagaaggcattctctcaacccctttgataccaactttaatttttaaattctattcagcctatttagtgttttgatgcacaaaacttgctttttaccatttttgctgtgttacttcttttatgtttgtagtaggtgcccattatgggcacaccactctatactgtaattatcaggaagctttattggcaggacattttacaaggctatagagacatggactcataataagtacaggcaatgatggaacaagcttgatcctgatttaacagactccaaatccaaaaacaccgtccggggtaagcctatgctttgcaggccaacacctggcgtcaggcaggataccacccttaaaataaatcttcattattaaatagatccagggctctgaagtcgtttttggcaatgtattgtgtaaaggtgaacataaacagtggtggaattattctgatatgaaatacaacttgtataacctatgttgatatacaaaattttttattgacattttgggcttactctcacttaagcagagaggcagagtgggaaagaaagaggtctgactttgtagcaaaagtgacttggtcttgtgctggcttaggagcagtgattccttgagcaagtttcttctctccatgctttaggcgactggtttgtaaagtttcagcataaagtgcaaacacacagggtggttttgaattcctagtgagatgaggaatgtgacagtgcctactgcagagctctcacctcttgggggtcagaaaatgtccatttcctccttatgagaatgttgcaaagccagacaaatggaggaatggaaagttaaacaacaacagtaaacactgaatgtaccctgccatgggaaagacagcaggctgttttctgctatgtaacctttgtgtctctggcagtttttaaagggcttatttggagactttgctcgcaatggctatgcgctgttctgtctctggacagaatctctgtatctcaagggacagaaagatctaataagcaggcaaaaagtccctttagttctaggtttaagagctttacctcattacttaaaagctagtgtggcagagagtttagtatttggcaggagggggattttttttttaattgttcaaagggatgaggataaacactaggatcaataattatgccaagcattccctcgtggggaagaaccccagtctcaggttgactctagtcccacaggatgttcctggggcaggacagctactgacccccagaggctggatttgccctggccccgtctggggagcgacgtcctccctaatagcacagaacaaatgatcaggacttcagcctgcttcaacattacccagacagctgggaacttggcacatgggcctccactttcacataccttcagcaattacatattcatttgcttttaaaatgttttaaaattcacgtacagtgaaactcacagatcttttttttttttattatactttaagttttagggtacatgtgcacaacatgcaggttagttacatatgtatacatgtgccatgttggtgtgctgcacccagtaactcatcatttaacattaggtatatctccaaatgctatccctccccactccccccaccccacaasaggccccagagtgtgatgttccccttcctgtgtccatgtgttctcattgttcaattcccacctatgagtgagaacatgcagtgtttggtttttttgtccttgtgatagtttgctgagaatgatggtttccagcttyatccatgtccctacaaaggacatgaactcatcattttktatggctgcatagtattccatggtgtatatgtgccacattttcttaatccagtctatcattgttggacatttgggttggttccaagtctttgcttttgtgaatagtgccgcaataaacatatgtgtgcatgtgtctttacagcagcatgatttataatcctttgggtatatacccagtaatgggattgctgggtcaaatggtatttctagttctagattcctgaggaatcgccacactgamttccacaatgattgaactagtttacagtcccaccaacagtgtaaaagtgttcctatttctccacatcctctccagcacctgttgtttcctgactttttaatgattgccattctaactggtgtgagatggtatctcattgtgtttttgatttgcatttttctgatggccagtgatgatgagcattttttcatgtgtcttttggctgcataaatgtcttcttttgagaagtgtctgttcatatccttcacccactttttgatggggttgtttgtttttttcttgtaaatttgtttgagttcwttgtagattctggatattagccctttgtcagataagtagattgcaaaaattgtctcccattttgtaggttgcctgttcactctgatrgtagtttcttttgctgtgcagaagctctttagtttaattagatcccatttgtcaattttggcttttgttgtcattgcttttggtgttttagacatgaagtccttgcccatgcctatgtcctgaatggtattgcctaggttttcttctagggtttttatggttttaggtctaacatgtaagtctttaatctatcttgaattaatttttgtataaggtgtaaggaagggatccagtttcagctttctacatatggctagccagttttcccagcaccatttattaaataggggatcatttccccattgcttgtttttgtcaggtttgtcaaagatcagatggttgtagatatgcagcattacttctgagggctctgttctgttccattggtctatatctctattttggtaccagtaccatgctgttttggttactgtagccttgtagtatagtttgaagtcaggtagcgtgatgcctccagctttgttcttttggcttaggattgacttcgcaatgcaggctcttttttggttccatatgaactctaaagtagttttttccaattctgtgaagaaagtcattggtagcttgatggggatggcattgaatctgtaaattaccttgggcagtatggccattttcatgatactgattcttcctagccatgagcatggaatgttcttccatttgtttgtgtcctcttttatttcattgagcagtggtttgtagttctccttgaagaggtccttcacatcccttgtaagttggattcctaggtattttattctctttgaagcaattgtgaatgggagttcactcatgatttggctctctgtttgtctgttattggtgtatgagaatgcttgtgatttttgcccatcgattttgtgtcctgagactttgctgaagttgcctatcagcttaaggagatttttggctgagacgatggggttttctagatacataatcatgccatctgcaaacagggacaatttgacttcctcttttcctaactgaataccctttatttccttctcctgcctgattgccctggccagaacttccaacactgtgttgaataggagtggtgagagagggcatccctgtcttgtgccagttttcaaagggaatgctttcagtttttgcccattcagtatgatattggctgtgggtttgtcatagatagctcttattattttgagatacgtcccatcaatacctaatttattgagagtttttagcatgaagggttgttgaaatttgtcaaaggcgttttctgcatctattgagataatcatatggtttttgtcattggttctgtttatatgctggattatgtttattgatttgcatatgttgaaccagccttgcatcccagggatgaagcccacttgatcatggtggataagctttttgatgtgctgctggatttggtttgccagtattttattgaggatttttgcatcaatgttcatcaaggatattggtgtaaaattctctttttttgtggtgtctctgccaggctttggtatcaggatgatgctggcctcataaaatgagttagggaggattccctctttttctgttgtttggaatggtttcagaaggaatggtaccagctcctccttgtacctctggtagaatttggctgtgaatccatctggtcctggactttttttggttggtaarctaytaattattgctcaatttcagagcctattattggtctattcagagattcaacttcttcctggtttagtcktgggagggggtatgtttcgaggaatttatccatttcttctagattttctagtttatttgcgtagaggtgtttatagtagtctctgatggtagttttatttctctgggatcagtggtgatttcccctttatcattttttattgcaystatttgattcttctctcttttcttctttattagtcttgctagcagtctatcaattttgttgatcttttcaaaaaaccagctcctggattcattgattttttgacgggttttttgtgtctctgtttccttcagttctgctctgattttagttatttcttgccttctgctagcttttgaatgtgtttgctcttgcttctcttgttcttttaattgtggtgttagggtgtcaattttagatctttcctgcttcctcttgtgggcatttagtgccataaatttccctctacacactgctttgaatgtgtcccagagattctggtatgttgtgtctttgttctcgttggtttcaaagaacatctttatttctgccttcatttcgttatgtactcagtagtcattcaggagccgattgttcagtttccatgtagttgagcggttttgagtgagtttcttaatcctgagttctagtttgattgcactgtggtctgagagacagtttgttataatttctgttcttttacatttgctgaggagagctttacttccaactatgtggtcaattttggaataagtgtggtgtggtgctcagaagagtgtatattctgttgatttggggtggagagttctgtagatgtctattaggtccacctggtgcagagctgagttcaagtcctggatatccttgttaactytctgtctcrttcatctgtctaatgttgacagtagggtgttaaagtctcccattattaatgtgtgggagtctaagtctctttgtaggtctctaaggrcttgctttatgaatctgggtgctcctgtattgggtrcwtatatttaggatagttagctcttcttgttgaattgatccctttaccattatgtaatggccttctttgtctcttttgatctttgttggtttaaaatctgttttatcagagactacgattgcaacccctgcctttttttgttttccatttgcttggtagattttcctgyrtccctttattttgagcctatgtatgtctctgcacttgagatgggtttcctgaatacagcacactgatgggtcttgactctttatccaatttgccagtctgtgtcttttaattggagcatttagcccatttacatttaaggctaatattgttatgtgtgaatttgatactgtcattataatgttagctggttattttactcgttagttgatgcagtttcttcctagccttgatggtctttacagtttggcatgtttttgcagtggctggtaccggttgttcctttccatatttagtgcttccttcaggaggtcttgtagggcaggcctggtggtgacaaaatctctcagcatttgcttgtctgtaaaggattttatttctccttcacttatgaagcttagtttggctggatatgaaattctgggttgaaaattcttttctttaagaatgttgaatattggcccccactctcttcaggcttgtagagtttctgctgagagatcagctgttagtctgakgggcttccctttgtgggtaacccaacctttctctctggctgtccttaacattttttccttcattttaacttcggtgaatctgacaattatgtgtcttggagttgctcttctcgaggagtatctttgtggcgttctctgtatttcctgaatttgaatgttggcctgccttgctagattsgggaagttctcctgtataatatcctgcagagtgttttccaacttggttctattctccctgtcactttcaggtacaccagtcagacatagatttggtcttttcacatagtcccatatttcttggaggctttgttcgtttctttttattcttttttctctaaacgtctcttctcacttcatttcattcatttgatcttccatcactgataccctttcttccagttgatygaatcggctactgaggcttgtgcattcatcacgtagttctcgtgccttggttttcagctccatccggtcctttaaggacttctctgcattggttattctagttagccattyatcagatcttaatgaacaatttgatgagttttgaaaaatgtacatatatctgtataactaattccctaatcagtcctcaccacccatgggcaacactgttctgatatctataaccacaaattagttttgctttttcttgaagaatctacttatttttgatactgcattattattcacttttccttgatacataggattttttttaatgttgcataagtggttcttggctgtgaaaacttgttacgagacttataayctaagtccaagaaaccagcttttagcagccactttggattgtctttgtttcttagagttataattttgaaattgttccattccctttgatgaaaatgtgcattaagaagataagcatccttatgagatctaaagactaagcgttagtatgtactggatcttggtctccatgattccttgagtataaaagaggagtccataagagcctatattttggccaggcgcggtggcccacacctgtaatcccagcactttgggaggccgaggcgggcagatcgcaaggtcaggagtttgagactagcctaaccaacatggtgaaaccccgtctctactaaaaatacaaaaattagccggggcgtggtggcgggcacakgtaatcccagctactcaggaggctgaggcaggagaattgcttgaacccgggagccagaggttgcagtgagccgagagcgcatcattacactccagcctgggcgacagagtgagactctgtctcaaaaaaaaaaaaaaaaaaaaaagcctatattttgtactagggctgatttcactttttcctgtggggagtagtagaaagaattgtagctcttgggatcaagtctggagagtgtctgggtctgcatattcttgaactagttatgtaagttttctgaacatcagattgctctgtgataaaatgggaatgaaaattaaagaattatgtcaaggattaaatgaatgaacagttacaaagtgcctgttacatggcaagcccacccttctcctttttttaatggcaagctttttagcatttgaatttttctggttttagcgaggaggagatttcttaactgtattagaaacaatggcattgatcatgttatttctgatgccagttatcttcagggcactgctttcttatatcttgcaattccttagaagcttctctccaacctacttggctgcccattcgtagccacgaaggctgtgagagtaaactaaaagcatcattctcctctgtttatccttgtctcatcccccaaccatggaatatctgtaaacattctcttgagataaatcataggtataaaggtgcctgtatatacagaaggataaaatcaatcttaccagtcacttaaagaaatatctaactttgattctaaaattcattaagaagagcccaccccaaaaccataactaaaatggtcaaaattggctaatgtacacataggcaatacagaagaggataccagcttagccaataacaataaaaaagatgttcattctctccagtaatcaggaaaatacaaattaaagcaacaatgagatgcaattttatgcccatcagattgacaaacattgaaaaagtctgataacaccagatgctgataaggatgtgaggttaatggagactcttaggccttgctagtaaaggtataaatttctgtaatctttttgaagatttagccagagaagttgctgcacatgtgcacaagaagaaaatcaaagatgtttcttaaagattgtagtagcaaaaagttgcaaacaacccaaacatccattctttggagatcaaatgaatacagtttgatatggaatgcaatattgtatataaaatgaatgaaccagatttatatgaattgatcttaaaaaacaacattgaatataattgcaagttgcaaaatgattcctatatattatttcatttaagaaacctttttgaaagataaaagtactatgttttgtgtatagatttatgtatttttaacagtataatgaagaaggttgactatggtaggaggaacaggggggagaagaaagactggaaagaggaagtccaatttaattttatcttaatttaatagtattaataaaggaaacatcaccaaatattaacatttagtaattctgtatcagtagttgtcaatgcgtcttttgtscctggaccagcagcatttgtaatcatctgagaacttttagaaatacaggccccagtctagatctacaaaatctgaaatttggggggtagacccacgaaactgtgttttaacaagtctcacactaacactgttttagatggcaaaggcatggatgtttactgtctcattctttgtgattttctatactttttaaattaaaaattaaataatctcaagcttttctttcttctctcttccagtgtcgccttaggctataagtttcaactccataattaatggcttattaagaaaataaagtttttactgccacacaaagttctcagatatggatggrtttcttaatattaagcaaaggctagagccaaaaatgggaagacataattaattattatttgaatatgcattgttcagttagtacattaccctaaaaaattttattctttctggcatttttcccattatcatcaacaacacatactattcaacttttgagtacatgtaaaataatgcaaagtgttgataatagcataaaatataaatcaagtacttagaaagcaatctaattgcagggctaggatgtgagtaaagaaaattaggttaaaaaggaataccctgcctcgtatagggcgtatacaactgccacatggagtttcagaggggtaggtctgaagggaagattttttggagatttggcctcagtagagaggtgatatttcaaggaattatgtgaacacaggacattgcggtattctaacccaaagacccatgtaagtgatatagttaagttgagagtgtggaatgttaggtagagtctttaatttttattctgtagatgggtgaaaccattaaaattcttgagaaatgagatgatctgtgtatgcacaacagtgccccaagaatataaatttggctaaattgtcaaagatggactgaaggcaggaagatgattaggaatgagatgtcaagttcttcaaagacagtgaggatttacatagtgaaacagaagagataaaatgaggtgaggagaagaagaaaaakaatgcaagaatataagaatcayaattgaatggaatgtattggtttcttaatgctgctgtaaaaaaactaccagaaatttagtgacttaaaatagcacacatgtattatttgaagctttggacttcagagtctaaaataattcccagtgggctaaaatcagggcatctacagggctgtgtttctgtgtggagtctctagaaacagacctgttctcttggcccttctagcctccataggctgcctgtacccctttgctcatggccccttcctctgtcttcaaaatctgcagaacagcatcatcaaatgtttccttgactctgcctctcctgcattccacttttccttacaaggaccttgtgattacattgggcccacctagataattcaggataatctccccatctccagatctttaactttatcacatgtcaaaaaccccgtttgtcatttaagggtcacatattcgtaggttccagagattaggacaaggacatctttgggggccattatttgcctaccacatggaatattaccataacttgatgattccttaggattcagaagagaagtcagaaagcctggatcggttatgtcaactctctcactctcagttttctcatctgtaaagcaggtggggagaggatgtgggggtgggattcccaagcctaacactgattagaatgtcagctctctgaggacagggattttcatctgttttgttcactactggtacataaaggcacttagtagttagctgttgaataaagtatttatggcagaatgaataaatgagtcaaagaaaagtttgaaaagagcactagggaaaattctcccctaactcctctatatattgttaagttctagttttcttagtaaagtttgtatttggctcagattagactgtctagagtcctgtcattgcagtggagatcttctgaggctgagagagagggatagctatgatttgtagtctgtcctttcctcctttgcttttagtttccatgctgagcatcccctgaacyggggatggggaaatgtattgggattgatgtatgacctcagtaaatgtctggggcagctgcttattgaagaagaaattgctcactgtggcaatgatcagttgccctgaaacaaccagctgtcacattccatactgctcgcccagtgagagtcaagtcttggccyttgcattcctaaaagaacactcgaccctgtgaggacataacatccatttgtgctgtgcatagtgccagtaaaatagaaaacagaaaggcttttttgcgcttttacagaaatagcgtggagtgcccrtatctgagagtacagttagccagcaggtaggcaaaagtgaatggacattctgatatggaagctaatgcttttaggggtgctgcctctcacatggagtctgagatatacttagagtaaaagctgtcattaaaaatggacatttcaaagcctatagttaacagttacttgatttaaagacaatgatctaatttgtttaaagaagcaatggatgacagcagaaagaaggactgaatttatttgaacatgagggcagaggatgccagttttgctcaggatccttaaagtcagaattaaactgttaatttgtcttttattgtgtatgcaaccctggatgaacactatgccttttcttctattttttgtctgtttttatcagtgtcatttttcaaatgtcatccttctggggatggaggcacatatacatgttagatatacagttgtctcttagtatacaaagagggattgatttgaggactccactccatcccctcataccaaagtctgtggatgcccaagtcccttatataaaatggcataatatttgcataaaacctatgcacatcctctcatacactgtaaatcacctctggattactttttttgttacacttgtaggacatttgttcttagggagtcacaagttttgtgccccttgtcacagtgacctcagatgcctgttccatgtgttataaacagaggagccattcttcagccccctgctctgagcacacccctagattacttatactacctaatataatgtgagtgctctgtacgtaattgtcctactatatttattttatgttatttttattgctgtgggtttaaaatttttttgtcaaacattttctatcacagttgkatacaaaggaccaactatattttcctggtctaatagtctcttgacagaacttgttttttttttaatatttctttatttattggtacaaatttacagggtatatgtgaaactttgttacatgtatataatgcatrgtgatcaaatgagggtatttctggtgtctattacccctaatacaatacatttttgttaagtatagtcaccctcctatactataaaacatttawtttatttcttctatcttactgtatgtttgtaatcccagcactttgggaggccagagcaggaggattgcttgagtgcagggcatagtgagaccagcctgggcatagtgagacctcatctctacaaaaaaatttttaaaatttaaccaggcatggtagtacatgccttccaagtagtcccagctgcttggaagctgaggttggagaatagcctcagcctcgaagatcaagcctgcagtgagctgtgattgtgccactgtactccagcctgggcaacagagcaagaccctgtctcaaaaagaaaaaaaaaaaaaagactgaaaggaatcatcatctcactgtaaatttatgttgatatgatgatggactaaaatgttaatatagtttgattagtgatcatttaataagcagctgattttttgtcttcttatatttttgagtgagcaggagctttctctttattttcttgcttagtacattgcttcatacagttccaggtacagatagcatatcaatgtayactttttgtactgcatatttatcagaaactttgcataatactttctatatctgtttgaaactcatctttcttaaaacacagatttaaagtttatgtctttactttgtaaaactatttattagagaaaaaaaatttaaatgtcatttctgagactccttctcttttacccacattaagtgccccttcagtgctcctagcaatccatggccactgtatcatgaaactgatcccaccatcctactacgctataagtctatgtttatgtatcactcattcttgattctgagctcgttcagagtaatcacttccccagttttttattactttttggtacgtaataggcacttcactatttgttgagtggatgaatgaatacctgagcatttaaaataaccaaattatactactctatattagaccccaatgaccttcaagtggctcttattatagttcccgtgaacattcgtaactacaatccagacatttttgaccttagaggaattttactagaaatttagtcactgaggttagagcatctagaaatctgccactcttttcaagagctaaagagcatgtaaaaataagagagagttgctctaagggaaatgaaaaggtataggataattgcataattctgcttttaaaaacaattaatatccctttaccatatgggcaaaaaaaaaagagagagagagagaaaaatgttaagaagactagaaaactacataagacaagaaggtatttccccttccttgttctgctatcctagaggagaattttatatctttttcttaaagctaagatactataatgagctgagaaaacaaagtgaaccatccacatagaactaaagatacatatttctgaagtatagccagttagaggataatagcttattccactgatactaaatagcagaagaaaggaaagagtagaattaataagtaataaagaggagagaagagtaagttgaaggtctttataggactaaggtaataactcaaaatgaaggtggaactaaaaggtaagtaacttccaaatgccttctgatctatttgaaataagcctcagcatgttaattcctgttttgatttttcagtaccctctttcccaaaaataagtctgttgaaggtaaaataattttcaagggcagaaatttcaaaagaagttggactgcatccctacattaagaattatttttgccctaatgatcctcctgcattctttccatgattggccactaggtcctgtttcatttttagtaaaagagcatttagcygttttggaatattatatttaaaacccatataaaatgttcatattcttatatactttattggaactgtaatcaaaatgtgttgtttatatttaaaaactatggaaaatatatacttaaaatgtgattgctaaaataatttcattcaaaatgcagggtgaaatcacaggatcaaacatagtttgggccctaataaattaaaaacattcraattcttattaggatgaaagaatgtggtaaatgatgtaaagcttgctcaaatgctgatgaggggttttgcttttgttttgtagactagtgttattttaaagcacatgcaggatatcttctataaatacattttggtgaatttttacaagtaatttcagtcaataaaaaaattgtcgcttttctctccttataccaggttgttggtgtagcccaggccatcaacaagaaatcaggaaacggtgggacatttactgaaaaagatgaaaaggtaccaaaacttgtgtcagacatgagccaatttaggaagatgctttctctttatagtatayacacctctaggtttagctgttgctgaaattgttggtcacacaaaaaaattagagttaaaaatgatctgaaatgttcaagtgtatcttaggctaaataaagcgatgatttcacatctgagtacttgtgttattcagtcagcagaaacccccaaattccctccttgctgtgctgccaagcctgcactgggcatgttggggccacacagagggtgacttatggtattttaactatatcatttacctttcatcactgctatagagatccaaccttgagtaaaaccccataaaaacactgctccaagttcagcacttttggttgactaaaaattggaattgcctcctggcgtagcaaatttctgaatgttttataagccttgcgcacagacagtggggcgccaaggtatgaattcaggctggatgatgtaaatttagcttcagagagagcaacagccagcattattttattatacttctcgttcaactctgaaggagtaccttccacacgcctcattgacatgctttccatttaaggacaaaagcccgtaaacctgtcgataaattcattctatgagtaggttttattatttttcctattgaataagtaattatgtgtatatcatagcctactgaattattcctattcaaagcccattgctgtttatgttgttcccctgaaaattactaggagcttttgaatttggaagacgttcaaacaagacagttatttttatctctatgctataggctaggttggcacctgtgttgctccccttgttataattgcttcagaacatagcaaatactttttaaatcgagtaatagacatctaggctcctgttctgttcatggcacttgagaatatttggtgtgaaaacatggttcctggattggctttgaattccattattatgtctataatccattaatataactccctcttgaattgatttgaatttttaaggctctatcacattgtggataagatatgctgtctaaatatttatttcaatcaataattaatactattaattattattaattataataatattaattaataataattaatagtcaatcaataattaatataattagaaacacattaccctagtatagtttaatgaggatgatagatccatgttaaaaatgacatatttaatgtttgcaactttatataatatttaactttatgcttttattgtgaatattcttttaacaagtatgtaagctgttgtttgctgcagtaatgagttacaagctatttatataataatttcagcatagatccaagtcttaatatcatggagaggctaaaccaaattttgcatggaataaattgtaacttcaagtggtataaagagataaagtctttatcttagttcctctcctttttctccttattgatttatacctaatttataccttaggagactattccaatacctttagctaagacttagtttatatcatcctaattttatgtagaacaaacatctattcttttggctttctaactgtaaatatttgaggatctgtatttcaggcaatgtaactagactgttttatgtaccgtttttatttgtctattatctgttttttaggactttgctgcttatttggcattttgtggtattgttcttcataatgctcagctctatgagacttcactgctggagaacaagagaaatcaggtcagtctgattactaaagaaagtgcatagaaatactttttaaaaattgttacatttttatccaagtaatgtaygcagatgattaaaaatttagatagtacagattcagtttctcaatactttattttttctagtagtcatttgtatttcctattttccatgcttagttgtttatcttattagacaatgttcattaacttgggagatgagaatttatttgacttacaccacacgttacttgccattactcttatcctactggaatcattctgtcactgttttaagtcactgtatgggttgcacttgtgttgttaaataatggttttagttcttgctctgtcaactgtagatattactcttgatttcatactttgtaagacaggtgtcttagcatcccctgttctctttatctctttttcccaactaccgctccttagccctgcttttyccatctggactttttcttttacaattgcccacattggtaatatatactgttctacaaccatgatgaacttttcctgggctttgtctaggttaattctaaagttgcaattctaaagaaactatttataagcactataattatgtaaatgttgttcatactacctttgttacagaacttttcatttttcctgatgtttctgaattkttttccttgaactctttgctctagtatagcctcatgttcttgtttcctcctctccccaaactccattatattaggcatcctgttgagttccccttctgcttctgtttgcagaggtccaaactgaggttctccaacctttcttcttccaagctamactatttagccctatgcctgctacactagtgtcatcatagaacttttcttcattgctttcttagattccactatcttttggatcccctacttctttctcacttccttattttgttgcagcacattctcaattaactacttaagaaagggcattggtaaagtaaactttctgagtccttgcatgtatgaaaatatgtattgtagcatcctgccactttggctgggtataaaattctaaactgaaaaatcagtttctcagaatttagaagtagtgctttgtcttctaactagcatccatgttgtccttattcttagctcttttgtagctatatttattatctacaatataaatatataacatggcatataatacatattttgtatttttatattattatttatatctatttttgtctatgtgtctataagcttttcagattatttatawttgcttttgtaacttaatttcacagtattttttttcattcatcatgctggtatctgtatgttggttcatctctttggaggtttaagcaaactgtttacttctgtgtaattcttttttcattatttctttgataattcatcttctctaccctctattttctctgtttagaatctgtgttaataagatatgggaccttccattgactttaactgcaatgttctccctgttctattcttgccatcctttcatccagtccccatttttacaaacagatgggatcacaccacttccttcctgcagtgcatcacagtcgaaactgcttcaaaagacatacagtgcttttcaggttctttttctacttaacgctgcaacctcatctcccagttcttctctttatagtctgtgctcttataaaatctaatcaaaactttcagtataccactttctctgaattctattatttttgcctgaaatatttctcttccctatttcacctgaatgattcctgctcatctttcagacctcagctaggatagcgtcacctccactaagtttttggtaatacttatgaggttcagaagaaagagaaatctaccagaaaaaaacacaaaggaaattcttaaaactttgtttactttgacgggtaatatttactgtgctctgtaaaaatattgataatgttgacaaatgttgatctgaaaagtttggaacaacattaacagtgcgttttatgtaccagatagtgttcaaaatactttataaatattatcttaatcctcctaacagccctatgattttaatgtcattaatatccccatgttgaagaaatttgccctcagtctcaaagctagcagtaaaggaagtcaggattaaaaactgattactctggcttcagaggctgtgatcttaacaactatattaactatattaacagtcaataaaggattttgttaataagtggagacgtatttatatttgaatgcagacttgatcataacctgctaggttatataaacaatttataacccatataaataattgtgctttaataattacaatcaattgctaaataatgagctcctaatttttttgtctaggtgctgcttgaccttgctagtttaatttttgaagaacaacaatcattagaagtaattttgaagaaaatagctgccactattatctctttcatgcaagtgcagaaatgcaccattttcatagtggatgaagattgctccgtgagtacagagtatgacttttttatttttagaaagacagaaacttatatttctataagcactacttttaaacctcattttggtcttagaaccctctctcaaacccaaatgtgtatgaatatgtatataaaactaatcagggtatgagctgttctggttgaagacaggtaggggtggagggtggagggtgtcttcatcagcctttttttacctctgttcatgtccccatcccaacctcctgaaaatagttaccatgggaatgtctgtgtgctgcttctaccaatggctacactgtcttcatggagaaatatattgtcattacagtgtgctgacttttcatggtcaggaatactggtgacctagttgctatgaacaggcagaccagactcctcattctggatgggttgggtataaaaatttcttcttactagaaattgtatagaaaccaaaaggcatagccagtaggagtattactaatggtccccataagtcccatatttttaccaacagtggaaaaccactaagctgttctaactggtagatttcagtccattgattttgtaatgtgaagaaacattttcaggtgtctggggtaagatagactgttgtcacagagtgctagttacagccaggccagctgtcttgagtttgccagtagaatcagggcccctggcctaaggcagtttttctttatgcactttctctcccttctcaacctatgaaccactgtttctggaatatttctttttgctgtagttgtttgttttctttttcctttagtccctaagaataggttgttcatttgtggattaataggaaagagagcrtgcactatcacttgtataggtcaattataatctacatatgatatccgaagttatgttttggggcaaagtagaataataaaaggtattcagtacttaatttatattaagaaattttagttgatttagatataaggactatactgtatgacccaacatctcaaccatttgggatgtgtatatgtgtcagatgaatgcattgtttaatacaaaattctgattaatatcaaatgagaactcagtaggctaaaaggtaatcagtattttcatagatactatttcatatttttcaatcagttataaaatccttaatatagaggtgattttaatatagtagccatgccatcattttaaacttcaggtcagaattccttaatgtagtatgtcacttaatctgtaatttttgctctatgacccactttttgcatttaatttttgaaagttatatgtgaagcactcctttttttacacaacttaaatatcactttaattcgcactcaatggatacttctaccagttaacacctgttatggtagtacactgatttggatcagtgctacttggaagtatagcgcaacaatatgcttattaagatattttgcttactttttgactacttaagttgtaggatttagaaaaggaattaggtgactttatattcatttgtattacatttatttgttgtttaaaagtacatcaacaacatgagcaaaggtgaaaatgtaagaaggaaagaaatgtacagatttcttccatccccagattaaactatcattttttttttctgttttcttccaattctgtataaatagagcatgggcataatgtgctgttctgctttttaatgtgatttaaaaaattttttttctttcttattttcgagacagagtattgctgtatcattcaggctggagtgcagtggcacgatctcaccatcgcagctcactgcaaccttggtctcccaggttcaagaaattcttgtgcctcagccttcccagtagttgggatgacagaggcatgcccacaacatccagctaatttttgtatttttagtagagtaggggttttgccatgttggccagtctggtctcaaattcctggcctcaagtgatccrcccaccttggcctcccaaagtgttgggattataggcatgaaccaccacacctttaatgtaatttcaaaagtatttctctatgttgttaaaattttcacagttattttaataatcacataaagtattactgaatgaaacatctttttaagaagggattctttacctgggatttaacaacaatcaatgtacttaagcgttaaaagccaaaacttgagaattttcaataagtgtaaaaaattttgaaactaataaatccatcagcacctagaaaaaaacaaatagtcctcatataatcattcttccaagagaaaatcagaaattatatgaacgaaacttttattttaattaaatgggaagcagttttgaggatgtcataaaatgagtacttgggtctattttgtccaagaataagtaaaaatatactacaagtattggggtcttttgtcaattccatagcatgtatgtctgtatctagatagttttcattaccttgtcaaacttatttctcagcctgtgttgtctgtttttaggattctttttctagtgtgtttcacatggagtgtgaggaattagaaaaatcatctgatacattaacaaggtaaaagcacgtattctctrcttgtctttatcacatgatataatattggctaaatagttatttcatgaccagtttgatttaagaaatataagctacagattattttattgtctcttgtcttttctcacatttacggtcctaagtcgtcctccatcaagatggagagactattgaccacagtgacttaaagttgttactttgttaagtatttatatttaaatcaaaactcattactagactattattttgacaatgtggtacaaggaagggccttttctcctattaaaggattttaggaattagcaaagggtggggtgtaacttggaggcagatggggaattcatttgactcagaaggtagacctgactttaagccttgactgctgacttgggcatgaagtgagtagtcaagggagataaaccatggattgtctaaccagagagttttctgatgtcctggaatttggggttcacatggtcataattgaattgctgacctttatttccttcttggctttgctgatcatgcattgaagattatatcccgtctccacacctattctgtcctaagctcctgtgccattgcattttctagcagatttgacattgttttagttagtattgaatccttttgaaatgtctgaaaatgtgcacattaatatatattattttaattttatgatgctgtaatatcttttttcctttttggaaagaagattttagaaagtttctaggtaggacatatgtaaatatttgaatattttactttttggcttgcataaataatgagttcctatacataaatagaaatataggcatctctgtttatatatttacctttacctccatgggacaataggaacatcagtatgataatcatattaaaagtccaaaatgatgaattatctacattatcttttaatatttgtgcagcagcatatccctgtgtattatattttaggtattggcttttgatttttttcttataaattcagccaggccctctaatttcttttagcagtagctggacaaatccagtgaattggtgtgatagtgacctctactggtaaatatgcatttaaaaaaacacaaaaatgtcttgctatatatatatttgtttctaaataccacattccctctctgtaggaaaaatggaaaggatctttccacttattgatttaatgattccaagacagtcttagtataaagatattttttataaaggttaaataggtcagtgtgattaccttaaaagagactaatttacatggatcattttaactgatttattaattgactttacaataatgaaaatcatttcaacagtaatagcttatgttaactaaacatttaaagttagcttttttctttttttttttttgagacggagtctcgctctgtcgcccaggctggagtgcagtggcgggatctcggctcactgcaagctccgcctcccgggttcacgccattctcccgcctcagcctcccaagtagctgggactacaggcgcccgccactacgcccggctaattttttgtatttttagtagagacggggtttcactgtttttagctgggatggtaaagttagcttttattatagtgatacagtaaaaggcctctgagattttttttattttaataaaaattaggtaacaggcctaaatttgcagtaactgaatttaaaatggtgtttagtaatgttaacattttgaaaaagggcaaaactaatattgatacttatttttcaccagcaaattctttattttgttcctaaaactgattattggtaggatttaggactccaattctcattattaaaaactttgccaatccaaactttgccatctctcaatttgatgaagtactaggcaatttgatgttagcagtaagcaaatcattcttttcaggaagttatttatcaattaaaaagtatagctcattcgagatttttccaaccaatccactaatgacctcataaattaatatactgaagatggttttgaaatgttaaatgtaaaacaacatattcagggtgaacattacacataattattagaagcatatcataaaagggataaagcatagtaagctcttgggagttgagttgcccaggaatttccaaagggaggctcatttccacatggtgggaagttttagagtttttgtgcttcaattcaagagccacccaattagaaggaaaaaaatgagtataatgttgtgccgtttatgttagctctttaagaagtagatattttagtgctataattccatactaattaactttatgttcattcacaaatgcacatttgtgtcataaaatgataaatacatagaattaatccttttaggtcactttcttggaatatacatattagtttatacttgttattgattatcatattagaaaatataagtgtaattaaataagtaaagactactactttaaaaaattgtggatacagtgtagaagaatgtagaagtcagaytgattgtatttaaatgtaagtatttaagttgcaccacatactgggcttactagctgtgagacttcatgtaaattatttaatctctcaaagcctcagtttcttcatctgtagtggtagtaggattgtactaagaatcaaataagataatgtatataaaatgcttcagaaaatttctggcattcagtaagtgttagctattatttccatgtctctttgattttttttttatttgtctttggtttacattacctgcagtgactcccatttamttctaaagcacagaaatttatcttttcaagctccacgtacctaattctctcatcccaacaatgcactcatatacagttcattgatacacattgtacaaaaagccttagatgtgtgagttagtccaggtcttccaagaaacagatgccaagattagattaaatgtgcagaaatttattagagaaaacaccctgtgagaaccagagggaaggagccaggaaagccatcagaccaacacgaaagtctgacccagagttaaggagaggaagaaggaaggaaagttgtacagaagtatcctagacagctgaacagttctaaggaaggtttggcaaggctgctgggaagtcctctagctgaaatttactgtgagaagaatactgggcctcccaggattaggcctactttagtgtccctagtgtgctcagtctttttctctgggatcaaccctggtagaggtgacctcagtgcaaacttgttgatggcttccagagcacagcaacttgagacattggtcagctactctttctacaattggagctctgaggcacattctaaaggmcactataatattcccatcagtaaaagaatgagatccatattccttgtattacactttcaaaatctttcactatctgtcctagcctaacattttcagcctgaaatcatcattttattcttgacaatctgtaactatttagtgtttcccagttacacatagaactcttccatgtcagcaatgtgttttatactgtttcgttttgttttgttttttcctgcctggaatactctacctttcattcctgatgtctctcctttaaaaattctgaaccaactgtgaattcatttctctaatgctacctcttccctattccactccatttaggtgctacctgtccatcttctccacacgtgtggtgcttgcattgttacaccgtatcacttaggattaggcttaactgtggatcatgaaaacccaaaataaaaatagcttaaacaagaacacagtattattactctctcctgtaaaagcccagaggtagccagctcaggctyggtgctgtagctgtgctccacaaagaccytggggaccaagacacctttggactttctaccttacatccctaggatatggccctttccttcagggtcaaggatgcagctccagtcattatatccacattttaaacagtaggatgggggactgggaaagaagggacagacagcatgtatcacctgtctcttaggaaggttactagaagccatcacagacatttactcttacatcctgttgtctagaacttagccagatggcaatactaagccactagggtggctgagaaatgtggtctttattctgggtggccatatatgtccagacaaacagaaggggaggagaattattgaaggacaactggcagtctctgcactagactctacccaaatagtccatgtaatttaaacacattattcattctgtttcagtcttctactagattgtaagctcctatgacagttactaacctatgtaagtttgtcgcccatatactgctaagggtgcctctgatggagaaggtattcaatctttatttattgagttcaggaactaaaaatttatcaacatttcttatagagtaagaaacaaacatagtatcatgtaactttaataaatctaatgctcatttttcacttaaagtaaccatcaggaaaacctaaaaatttcaaggagttaaataaggtatcaggtatttgttgatttagaagtagtttttctacttctctttctctatattaactagtgtaagtctgaatttatgaactctgacaaattgcttaaccattttggattttttcctggctcctactcttaaaataatgatgatgataattaaaataatgatgatgaagaataataatagttattgatatgataattatcattttaaaagagattttacaaggatacttacttctccaatatacttcattctcctggtggtcaccttttcatttttcttcttttkttcactatagcttcttattttcttctctctaggctgttgctatttataaaatatttgtagttttaaacattgttttattaaactaaaccctgcatttatataaccttttcttgagtgtcactcaaataatatgtatgaagtaggacctcaggagtgtattaggtctgatgtgtatggtaactggcatgccttcacagactctcagcctagtctcaagaaatattcaatttaaagttcatttactattatgtcactcttctgtcatttccttttcattctttttcatgtatacataatactagacaagtggtcagtacttggtttgaccaaattacacttaaagtaaaatgtacaacaaagggaagactgaaatattttgaccaggaaccaggccacagggttcaggaatctttgtggaatcactagcgctgaaggacgccatatgaaaccactgtcccaagaagcagctgggtcaggttgggtgggaaggacagaagatagcaaaacattggaactttggaaacttagaacaagtggacatttttcctgagatgtatgctgttgtcactcagtatccttgggaaattagttccaggaacccctacagataccaaaatctgcagacactaaagtcccttgtataaaatgatgtagtatttgcctataacctrtgcacatccactctatattacttataatacctaatacaaygtaaatgctatttaaataattgttatgttgtactattgtttaaatttatgttattttttatttttgttttttttctttggtttattttcagtactgcagttgggtktatccaaagacgtggacttgtgggtacagagggccaactgtattttattttgaaatgtctactattgttaggttttcctacttctttagtgatattacaattaaaataagcatgttcttatagatagaataaattcccataacctgaccctctttgctgaatttatcatcaccacaagggaacatacggagtttcctgatgaaaaaacatgttccattctgttttccatcccttgcactgacactgtaccccctggcatcagattaatctttcatgttcactctgttaagcaagagactggaacataactggtaaaaatattgtaagttcataaaaatttcttgaggaagataaatttttaattttaaaagtatcttaaagcatctcaaagcagaaaaaaggtgtagagaggaaactgaacaaagggaaagatgctaaggaagacacgacaaaaagacagaaggagaaagaaaatagacttaactagagagaagagctttaaaaattttttctaagctgtttgatttttcccttggtcttaaaatgtgtaagatactgttttattggaatggatagagaaaccaaataatgaggaagtgaaacaagcactagaccttaggcattctataatctgatgggaaaataagatatgaggggacatatgagtttacattaaatgacaccaaaaatcaccatgcccatttgcgatgagaataaggccattcacacttataaaacttgttggaaatttgtgggattttgttttttcaaaacatttaaattatggtaactgacaaagttgtaaatcatcaaacacatttaaagctacattttccaaataagtatatatgccttataatttaaggctggtatttttctcccttaatcatttatttaactgtttgcccatgcttttttttaactgcacagagggaactcatatctgttattttcacagggaacatgatgcaaacaaaatcaattacatgtatgctcagtaygtcaaaaatactatggaaccacttaatatcccagatgtcagtaaggataaaagatttccctggacagtaagtaacccaattttagacttgaagctagaaggctgttttcccatcacatctgtacttacagttattcttgaactgaaggactggctctagaattgactgtttaggaatgatctgtgctttccctcatctgaggaaggagaataaaatagatcataacatctattgagagctgtagctggacatttttctttgtacttttttcacctttttaaatgtctattaataagttaccgtactatttttraagtaatttagctattacctacataatgtcaatgacattccttagataatattgctagagtttttgccttatttgcaaaaattagtttctgtgtggcttgaactgatgcaattggtaatctgtcatagtgagtagctctgggaaaatggatgtctgtttttcttgacctcaaagctacaaatatctagttctcagacactgaaaaatttgaattatagtattttctctcacctcttcaggaaagcattgcactttgaggcagctgccttgattttgttatttggatgattttgttatttgggtgttatttggagacattgttagaactttagcaatatagcaatagcaacagtggtattattaaaggacaggtttgtaacacggtgcattttaggtggcgtttagattctgcccctctcgttaaattatttggggcatttactacactagtatagtagatactgtacttttacttattttttttaacttatttttatattttacttattattaagctgcttggaaagtttaaagtgaaaaaaattccgatatttttaacaaagtagacattgctttatattgcatttatgtgaacttcattataatttatacattttctgctttccaatgctctctaatataaaagttgaatatatagtgctttcaaatgtgtcatatagtttatatggcatctaatggacaaatcaatctctttaccattttagctgttttgttctttttatttttgtttagactgaaaatacaggaaatgtaaaccagcagtgcattagaagtttgctttgtacacctataaaaaatggaaagaagaataaagttataggtaaaacctttcctttaacctatactctaaacttatttttaaaaatgtattcccagctatacttctttctttcaaatgtaaagaataaaatgttttaaaaaagataaaatttggaatgatagaataattaaaataattgataaataccaacagacatttgttaaatatcttataaactatggtgcacttttataattattatcctatttcagcagaattttttgtttaagaatgattgatgatgtattgaaatttggtagactgtataagagatattaagtagataatgtgtattgttttagagtcttatttcctggatgttgactttttttaagaatgtagtttaggttataggttatatttatttattcatttaatatttattgagcactccactgttcttggcagttgggataaatcaatgaacaaagcagaaattcctgccctcaggagcttatgttcttaacatgattatagaaaaacctctacttcaggaatgatggaagaatgcatkctcagaaaaattgaatgatgtttccttttattgacatattwgtttcctggtattgcagttatgtaaaggttaagtaggattttatatgccaatcatccgtggttgatgtagtgaaaaaggtctggactgttaacattctcctaggaacctggaaataaagaaaatatgataactttttaaaggttaaatttagaattaaaaccctaatggagcaacatttagatatataaatataactttaaaagtctgaatacttttccaattgcaagatttgactataattttattgaatgagagttttagtcagaaagaaggggcagagggtatcagtaatgaaaatagaaaaagawaagacagatattaaaagtgactgtccaagttctgtgcaagagtaaagtaacatttgtccctaacacagagatggatgtagagagttgtatcagtgtgcatcgagtattctgaccatatggtgagccttcactaggtgcaatggatgcatcagattatagccagtaatatctttccaattcccagtccctctgcctagaatgcatccttattgtgaaaggaatacatcagcttagcacaattcaacattctctgactctgatttcccttgttctgattccagtcccaccaatccaacttgtactgattactttcttttccagtgtaggttagctcatgggaagagaatgcattattcatgtcctctcaaatatactggttgccctgacagttgtttcttattgtatgaactggacttsaggcaatgggctggagctgcaggtgcttatacttctgtttctgggacagatctgtttctttttgaacattgatactattttggttttataaatcagtcttgtcaacttagttactgtgactccaccccagcagtcttcagtatgctaatctagtgcctaagctaaaaggttgagggtcagctcctgaccctggtgaattgtgcattaaagccgcttagaaaccagcgtgccaaccccctgctgggctgttgagtcaactcttctacagttctcagagaaaaaagtggaggctaatgaatctgtgagatcttttttaaagattgtcactgatcagatctctaacataagcaataaaagaaaactgccaagggtgccttacaatatgataccaagtaaatgttataaaattttatttcttagggaggtcaaggggaaaactatattataaatrttatgctgtttaaaatgcttttttataagtataaagatttactacaagctgtctttggcctttgaaaatgtgaaattaaattccagaaggaatgcattatttactagtaagttatcataggaaggaaggcagagtggcagcttgccccatcaagtcacatcttcacttttccccagcaacatttctttggaataataactgggaacggggagtggctggaggaagttacgcatcaggcccctttgtcactttatgtgaaggtaaatgagagcgagttagacgacatggaaagagtgctggactgggggtcngactcacagcantgtgttagcgccactcatcttcagccacacttatgggcacattactcacctctgtggagttgaacttaataacttttcagatctgttcaaaattcacattctgtgatcctgtcactgtgtcagacaagtaagaaaaaaataaaaaatgaaacaatcagacttttcttggcatacattttgtatcaccctacttgatgacagagccaaaagtaggcaaatgtagattttggagagaaaaattctttgtaaataaaaagaaaggaaaagaaatgatttctttagtcgggttttgtgtggggtgaagggaggttctcaagtagatcccaaatataagggggaaaatttccagtgttcctgctgctttacaagggtgacaaaactaagaatttgatttctggactatacttatgtacctacagttgtagcatggaaaatgtcatggttgtggataatttgtcttacatgtcatagaccagattccactattatgtaattctaatagagaatccctatagagttacatgcagaaagacagacggacacatgtgttgtttgtaatcttcttccttcttctcattttttccattactgacatttagatggaattatagacattagaccagtatggggcctgctgtcccatcacatttattccctgaggtattgtttcgtatcaaatgttttcttagtgctctggctaatacacagtgtttccactactttgcttccagtacttttaaggaaatatatttctcattgaacgttcatttattttaactaattattttccctgcttattatgctaaatgcctttttccaatattatatttaccagacatttttatgcctattttttccatatcaatttcaggataaattttgcagaaactagtcctattcccattgaaaatttattttaaaaaaagatacttagaacatctccactttaaatagcttactttttcatctccttgttaataaataaaagcataaaaataaaaattacagtgctgtaccacacattgtttgacagagaaatatgagaaagaaatatgtatttgtcaactggttactatcttaatcccttctcatgtacactgtaagaatgttctgttttttacttccacaatgaattttctaagtctcttacactttcaaacttgttctgttagcctgtttgaactggctaaacacctacatcattccratgctccaaatggcaccttattttagttcctttctatcaataaaatttgggagacctgcatgcctgcagagtttttttgagtaggccttaatgaatttttgaatcattgattgtcactaccacgtcatcttatcttactctgttaatttattttggctttatttaataaattactcrggtggaccwttaaataggtgaatacatggagagataagctgctcatctgtgtgttgcagtagaattccaaggcataaataagtattctaatgttatatcgcttaagtttgactactacttcattgtacttttcatattaaattttatcacttggcaatatcactattcatttgtttataattgtacattgtcttccatggtatacattgcttgtattacttaaagtatycaggttttttcccagttagagaattgtaarttatgcttasttataatgagcacaaggaaataagactgtagggtgtaagggcagtaataggtggaagaaaactagaaaaaaatagaattaagatattatagtttagaattatggaagtgaagatctatataataaaaacaatgtaaagattacagatttaataattgactgaagaaagacaaaaataaggaaaactttttagtagcactagaaaacagagaagtagtctttagtggatcagaaacactaaggaattcctggaacctgtgaagtatacgtcatttgtaaagacacattttatacaacatgggcaaaaattgaatagggataacaatatttctatcaaacaaagtagaatttatggtaaaacataatgtaaagaatcacctttcattgagtaaaattaaaactcatagaggaaaatgtaattgctgtgaatgctaataaactaaatagcatcattgacatacaaaaactaaagctgttaaaaatacacggagaaggctgggcgcggtggctcacgcctgtaatcccagcactttgggaggccgaggcgggcggatcacaaggtcaggagatcgagaccatcttggctaacacggtgaaaccccgtctctactaaaaatacaaaaaattagccgggcgcggtggcgggtgcctgtagtcccagctactcgggaggctgaggcaggagaatggcgtgaacctgggaggcggagcttgcagtgagccaagattgtgccactgcaatccggcctgggctaaagagcgggactccgtctcaaaaaaaaaaaaaaaaaaaaaaatacacggagaaatggacaaagtgatcatcacagtgggcctgaaatatacttgtcagtgttaaattataggaaaaaataaacattagaattgataaaaattaagtggatttaattgacatatatagctttactttcatgtttcagaatttaaaaatataaattattctaaaatatatgtcagaaatcaaatattggtgatatgcaacataaagtcagtcgtttctgaaaagcagaattgttggccactttcatagatcacagtgcattaaaactgttaatatataattaaaagataaattggaaggaaaaaactcacttagaacctgaaacgcattctcctaaatgacaaagaagaaatcaaaagtcataattaaattacagcattttagaaaagtaattgttctattaacataacataaaaactgaaggtacatggtcaaagctatactcagaggaaattatgtagctttaaatattttattattattaagaaataatgaaaaaattttaactaagcattcaaccgtagaaattagaaaaacagcacctttctctttctcactctgttgccttccccaaataagtatatacatgagaagaaagaaagtagaagaaaaaattgaaaaaataaacttatgaaatgagaagaaataagagataatgggcaaacacaataataatagatgaacctccaacggataatgaggatattaagagagaaacacaaatagtaatgagagagggaatgtaagtacagatatcaaagacattttaaaagatacttgatattacagtgtagcaaataggaattaacatttggtgaaatgggraatttctataaaaattggtaataaccaatactaactcaagaggattttagaattgttcatgggagtaactgagaaagaatttgttatttaaaaaaaaaaaaaaamaactattgcccaaagaaattctaaccaaagcaattagaagggaggcaaggttgaaataagatgagacacagaaaaaaaggaggcaaaataaaataacttacaaattatattagtgttaaatggaaaacccaaaaagaattagctgaaagtacctgtctagtaagagttttataagaagcctaattatcaaattattaaagagaaataattttaatatatgccaagacaaatttgttagaaaacaatggaaaaaaataaaaccatttactacagtaacaaagaataaacttggccagaaatatatgtcatctatatgaggaaagctacaaaattctgagtgacttaaaaatcattaagaagtgaatacatttctgaaatgattaaaatctagtttacgagatatcaagtctcccagattagatttgcatcaattttattatccttgtgagacatgggtgggggtggggaggttgttcctgatcaacatttacaaacattggtaatacttacaactggaggtgtaaaaagaatcatagctgatggttattgccctttcagaaattaaatttagatttaattcagaaattaaaatgatataaaagtaaaataattaaaaatatggtataggtgctaaaagacatgccaagattgatgaaacagaacagaaagtctaaatgtagacccatagtctggcatatataattgtgttactgtatgtaacagagtagggtatatttcattatttttaagtaagatacttttgaatgaaagacaccattttatgtatctccaagaaaataaaatatgatttcaatttactatgtcaagctattgatcataacatgcatactgatttcaaaaatattaaaatgtggaaaaagtatgtaatagttgaaacaaatatgaatttagtatatggtgacaattcagatcatcaaagaatgggtaactcttcagatgttataagactccaatagcagttaggggaaaaattaagtgggattataagattaaatgtaatacatctataaaagtactagggaaaatataggtttatatataatattaaaatgaggaagcctcttttaaaagcaaggcactatagttgaatattgtaaggataattattctggctccttaaaaaattaaatcttttatacagcaaaagcctctccaaattaagatgattgacaaatgaaaagtgcagaaacaaaagtatttgcaagataggtgataaaggttcgttttacattttaataaggcaggatgctaattttggagtccatgttatgtggtagagaggacataagactgcaagcagggtataagcattgaccccctgttctgccaaagagccaggaggaagactgtggttggtaacaacatccgatcccaagaattatggaaaagaaaatataactgtttaattttagaagccatctagtcccttcagcataatttccagaggtgccttcaatgctaaccaactctcagacctactgtgatgaccacattctgagtactttatgaactctataataatattaggtaacactgatagtttgctaacttcactacttcttggttcccccaatacatttttgaatgttgttttattttgtgattgcacttattaatgggtttttgctgaatggttctcttttatttttggttttgcattaaacatttcatttttaaatataaattattctgagtttgtatggtttatgagtaacgtggcatctcaaatttcagttttaaatttcattattgtactccttaatctttcagatcattaaggaagaagttgtgaacactctatctgtaaatgtgcccaggtttttagttttcttaaacagggaaccctgtttgttataagccctctttttctttataactttttgtttttacatgggtatttttgcttgatagaattaaactttccgaagagtgtaaagagatcaatgggattatcatgaatgctatttaaatatggctgctcatttcactttcaaaaagataattaatttatatgcctagatggatgatttgtcttcagtacccatttttgttgctgttgttgttgttgttttccccagagcttaactctgtgcctatagatctatatctataatggtagatcataacatggatatactttagttgttctgctctgagctgtatttgttatagcagaaccttgatatttctacacataacattccatttaaaggacttgcgggcaattccaaaggtataatttaatgactcttaatatattcattcagtgaattttgaccaaggcatagatttgaactgctgtactggagagatacttagctaggtcataagcctcgcagattgcctggtattcacatctcaacccctctgtgttgtacttttcttgctatacgtgtagtaattcttgtgaagtaatttttaaaatcttgtttatgaaaaaggctatcaagtaggagaaaactttagtaaaactgaaaggcaattccattgtgatgtgaggataagggcatgaaatgtgactctcaagaaaataagatttaggagacagaagcctgtataaacagttccatatttatattttggggattcacaaaggttgaaggacataacccttggtttgttttttgctttttgttcttgttttttgccacacacaggatatatacatttaagataatgaacgctgattgccatttagtatatggcttttacttgcagtgtccaaattcattatatcttgtctaaagtttcccttgactatggaataattgataaagtaacttctgcagcactattgcaaatagataagcatgtagatgtctttactgtttaaagtagataaacaaacaaaaagagcaaaaaggagagtccagatcatttatagtatgaaaagtaaagaaagtgaacattgatggtggtaaaggggcttaatgtgcaaccgtcttccagactctatgaaatccttttgtgctccaggaaaaataaaggataatagastattatagtcttcatgggaaactagttacagtcagagctgcaattctacattctttcattaattcggaaaacatttttttagttcctactatatgctaggcrttttgccagctgaagtggagctgaaaaaaataaataaaactctaagcccaagatactgacagtctagaaagagagagagaaataaaatttaccatgatacaccaactggtcatgttaagggaatagaaaaatgcctgcctcayctgtaagttagaggcctcctggaggtcattgggaaggaggtatagggatcaactggtgaggcgggagggaaggcaatggggagcagtgcagacctgtggaaaagcataagcaaaggtgtgggcaagcaagatgcaaccagggcactgatagcaatgatctgacaggtaatatggcagttgagagtggcccttgtggcaggctgagctggggattgaattttagacctacacataccagctaagtggctttgagcaaatgatgtaactttctgagattcagtttcctcatctgtaaaatgagaatagtcacatctacctcacagaataaattgagaagactggagatcatgtgtctaccraagtatttagcacaatgcctatcccacagtgggcacatggtagaagtttgttattatatactcagagacagaagtgataaggactttaacaacactttgtttacacagaggtaggctgggtcatcaaagtgacctctgtgaggtcactcctcacagagaccactaggctcagaaactcatagaacaaccagttaagatttatcctaatgttgatgtaatcttccatttttattgactacgtgtttaacttttatttctaagtagtcatttttatttgcataattatttgcagaatcaaaagttttctgcaaatttgattctgttggatacagaggtgtagatttgaaatttgagactgcttatgtcagttgcctcctttctgcattctattttgtatgtaaccgtgtgtgtgtgtgtgtgtgtgtgtgtgtgtgtgtgtgtgtgtgtgtgtgtatgtttaacttctggtttctcagtaaggaaaggagatctgtttgacccaaaattctgatgtgcatcaaaatcgttctcttggcaagtgtacaaaaatccaattagcttccaaaggacaaattgtctttggggactcaactgatctaaaattcgtgaccgagtctggaagaaaatagtactctaggattttttgaacgccagcaatgtacattttgaactacatgaaactagttctcatataaattctgtttacttctctagcttatatttgtgggggttaatttgcttatttcgacatactaagcattcctaagagaaaagtgtaagacaatctttgggtgtgtktgttaaagtccacaaaaactatgataatcaacaataacatttgctcaatttctcggattgttataggggtttgccaacttgttaataagatggaggagaatactggcaaggttaagcctttcaaccgaaatgacgaacagtttctggaagcttttgtcatcttttgtggcttggggatccagaacacgcagatgtatgaagcagtggagagagccatggccaagcaaatggtcacattggaggtgggtgaagtttagggacctctcacactgtacagccaaaccctcatcttttacctttccctcataatcactcatggtgtgtgtgtgttcygtcattgtgtcctcaccaaaattatgtgatttagatgatgagatccttattrtcctcaactaaagaatgaaagaaactaagactcagaatatttaagaaacttgtcaaatgtcrtataaccaaaccacaactcargatgtttatccctttatgcctttgctttttctgcagaaagcaatattgactttaataatccattgacacagatgactactgccaattatctgtctctttcccattgcctgagcctccccatctttccgtgagaacagttgtggaaaaaaattaaaaataaacaaacaaacaaaaaacagaaaccctaggcactcttaagagaattagaagtgaggaaaagaaaaaataaaatcaacgaaaagcaggaagagttttaactcctggaatcatctgagaaactatttcaaactataaatttatataccctacttctgaaagttctgattcagcaagtcttgggtagaagctgggaatctgtatgactaccaagctcccccaggtgactctgaatgtgcaggtagcgagtgaagaaaccactggctcccagggactgaccgaggaacactctttctcacaaaggaccagccgactccaacagggtcagtcctttctatatatgtttcactaactgccttgaaattattcarttgatgtaacatggagatttcttatctagttgaaattagagaaaatcagtgtttgggatataataacatttccctcaatctctcttaagtacataactaaccttaaagagctagagagacatatattatataaaatataccagatggtaccctttactttctatgctgaatatattatactaataggtttgctacagtattatataaaagactttgaatatataaaccagtggaaatctgtttcaaatatatatgtacacatatacacacaaatatatatttcaaatatagtttcaattaggtgcatatacacatgtacatatgtgtwcaaatagctttaaatatacagatacacatatatacatatatctatatatgtgtttattataaaatatataaatataatttttaatctaattttttcagtttcatggtttttcattgaaaaatttaatctaagtcagctatcaattagaagttatttcttttttaaatgttttattatggaaagtttcaagcatatacagaagtagacagaaagcttaataagccctcacatactcatcatccattcagtaattatcaacccatgaccattatcactccatccattcccaccgcactcctctgcacttcccttcccctcccactggcttagtttgaagcaatcccagacattgtattactttgttcagaatctctgaatattttcctgattgagacttatttctatctttgtagctctctttcagttaaatatatggataattaggcttttacctagtataaaaagtttttgatttcaggtcatatgtgtagtcatttctatgatcatagatataactttgaaaaaaatggtcctttctttatgagaccattggacaaaagccaagggcacaaacccctcaggtcttcaaaagacagtgaattattttgacctggaagttgtgatcattctaataacaataaaataatgatgacaataaaagtaactaaatttatcagatgtttcaattgtattctaatgcttacatgtattaacaaagttaatccttatgccccatgtgtaagttatttttatcttttgtgtgtgataaaatttttttaacttagaatgtattgtgtcatttctttattcatgtatccatgttgcactgcacttgttaatattagtctaactcatggacacagtattagcttttcttggggaaccaccactgtagtctcagtagcaacaggttatagccatgacccatcaatttcacacgtgcaggagagagcagctgtgagtttcttgaggtttcctagtgactaatggttcaaatggcaagaaagatgcaatgtagtgcagtatggtaacagttctaaatcataagatagtacaaatatgtatcatttggctttaaatttttaattacttaaaattttaaagactggttcaagaaatactggtttgggttgctgaattactttactcaccatttaaagtttgaaaatgagctaccttttcatcaatgctttttaagcttttggggttttttttgtaaatctgtgttgtctctctcaaaaatgaactttaaaaaaatatgctttcaaagcatgatagatactttaaatacaaccactaccttggtttaaaagaatgtttaaaaaaaatcccattgcagtttgggtaacccttacatgaaatgcttgagaccagaagtgttttgtattttgcattttttttcagatttttggaacatgtgcattatacttaatggttgagcagtccaaatccaaaaatctcaaactcaaaaatgtttcaaaatccaaaattctctgagcagcagcatgacactcaaaaggaaatgctcattagaggattttggatttcagatttttaggtttgggatgctcaacttgtaattagaaatgattgcttttgaaaatggaaattaagttaataagcctgattttttaactctaagtaatggaacgtgtataggttaggaattgaaagctgggtcctaaatctccttgtcctctcactaggtgtgagcttacagccaaatcatgtgactccctgaggctcagtgtccccaactgtcaatggatggctttacaggccagcactactctcttctcacctcttaaattgtaggagtgtaaagggatccttaaatctgcatgactgtgtcccaggcatccagtttttctgtgtgaattctagaatggttacaggcctcatctgagagccacttgtagactactttctttccaaatattaatatcaaaatgtcagattatgcagagattttctctttaattctgtacacaagcagaaatagctaaagtcaatattgtcttaaaaaaaaaaaacaaaataaattttctgccaaagtttgagccaaaagttatttctaggctggcttataaataatgtgtttgttatagcaataatgtcagactggaagttacaagagttttctttaaacatagggagtataactttttgttttccaaaacaagcaatggaatctaaatctgggtttttcactgttgaagaaaacagcraacaagatttggcattctgaggagtctaattatctctccaagaagacttagcagaattccaagcttgaagttctagtctacatgtggtagttctctcctgtgtaacctggacttcttttcctaccctgtaggttctgtcgtatcatgcttcagcagcagaggaagaaacaagagagctacagtcgttagcggtaattatcctctttctttttaaaaattactaattacagacacctaatttaaccaaatttggtaaatatttagatggatacttataaaaatgtttaattaactctgctttcttgcagggatgcaaagtcactgataatacaaagcaaaaggcattaaataacttatactgactgtgtaatatagtgtatgattctgatatttgttttccagtaattgttataatcattacatctttttggggccaaaattaaatttacttttcttttagttcctggagaaatggggaccatgaggtggttgtttggctagggtaataacaaaacaatttatagtttgttactgatacctactctgtattatcaagaattgagagtgattttaatttctgaccatatggcttataaaatgctgtttgaaattggggtcaaataaggtcagtwcctgaattctctttgcattatttagcatacaatgagagaaaagcacatggatatgtaagtagatgtatgttgtaggtcttggtttggaatggcttggttgagattaatgaaaatttgaggcactttaacactttacaacctaggttgtcctcctgtgtttaaatgtatttgcgatgacataggtaagggccatgtgagttgtgacaacagttatgtaaggaatgagaaaagtgtgaacagatcattgagagtctttttctgtcatcctcatcatagtttgccacatgctaaactctttgtgcccttaygtacatcttctcatgtaaactgcacaactgttttctcatgtaaacttcataactatgttatgaaggccgcactgaagcctggagaagcccagtgacttgctcaaggtcactgccatgcagtgaaagaatgaggatacaagttcaccatccagagcttgtgcacagaacactgtgctgagacaggaaagatgatccaaatattttgaccttggcaattcaaagaatgatggtgacattaattcataaaagtggaaatattaagatgaatattaagaatcacatgattcaagcaacacccttcatagctgctcctccactctcttttacacaaaacattataatttttgaatagtctatattcatttcttccaccatttacttttaccttttgcagtttcacttccctgaaactgcaggtttgatttaggacaagrtaagtttgaggtgctggttgaacaaccaagtgaacatcttcagcaatcagaaaaggcaggactcragcgatgaggtggtggtgtttagaactagaggtggagatttgggagttaacatcccatggtagtgaaatcataggggtgcatcaattgggagagaatgcagagaggtagagagactgagaacagaactcctgtgaatatagccttagatggaaggaacaggaaaagaaaacagcyaagaaggtagagaagtggtagttaaacaaggaggaagatttaggatagtgcagtggcacagaaggcaaaataaagtagtttcaaaaagggaggagatctcatcagtggtaggaaggatgagaaatatgaggattgtgaaaaagctgctgtggattcgttgattaagtgattattgagaacgcagtttcagggaagtgaaactgcaaaaggtaaaagtaaatggtggaagaaatgaatatagactattcaaaaattgtaatgttttgtgtaaaacagagtggaggagcagctatgaaggatgttgcccgaatcatgtgaagttttttattgtttggttaggttttgaatgtgtgagctggcattgctcacaagcaagagaggcagaatgttcttaggcaaaggcggaggcacaggagtcagtgtgagaataacaatgcaagacagtgaagagataaggaccttgaagagggctaggcatgaaagagcaacatttcttttgcccaaacaagaggatacagataataataatagctacatttgttgagcacttcctgtataccgagcgtgttttaagttctttgtgtaagtcaactaagtttactgaatccacaacctaaatgatcagtattgttagcattttgtaagagggaatttgtggcttagagagtttctattgtgcttctcaggatctcattaggttgtaaggagggaatggtgccagtactaaatccaggcagtctggatccagagcccacacaagattgcacagcactggagagagagtaagttagacagaacaaagtaaaatgaggacttgtaaacattttcagttaaatccatgagtaagaaactgagtcatttgccagtgaaactgagttaactgccaagaacaattctatgaactttagatactaattgcacctgaaaggttaaggtcctttttgagttaacctcatatggaattgtctatatttattttgtatgttgatgacagtatttgaagtgatgarcagtttttcaattatttacaaagctttacaggtttaaagtattattcacctcaggcttaattggcccatttgtctattcttcctagaaggatgtagttttcgagcaatatgtttggtgatttagaaattgtctacatattgaagttcctgcaggcactgcagggttaagttatttctaaaatgaaggtgagggttacactctatcattatatgtgttgttctaggttaaaaaaaaagctagcaataatttctaaagatgatattcaagtttgtttttcactttgaaaatagtagtctttcagaaaaatctgaaaattattttctcaatgtttataattttagcaagagaaaaatacttttgaataactgaaaattgctatattccagtattgttcaaaaccagctgttgttgcatttagaaaatagatttctggcagctgcattgagaaatttagggttacatagcttgtaggtcaagtaattcacttaaattggttgaaattcagcaactgatttcagttctagttgtctgtcaaccaaataaaaatgcctgtacagccctagctacacaggtgtttgtatcatccagcaatcaccaaaattgctgtcgtttgtctggttatctcaatttaaaacccaaaataaatggaaaagctatcaaatattttcttaatttttattttaacaaatttattcttaagagaattaaatctactaaatatttacgcctgtgtccagaaaaatttctccagttrtaacaaagtaattagtggataggaaattcagaatctttattttttccacttctgttgcttgagtgttgtatcccattataaatctaaccttctcttggcttaaaattgggtgtagcataaattaggtgttaaactgagcattttgcatatatcttttaatgatccttagttgcaagttgcggagataataataaaaggaccccggctgacctgttatggttattagaaagttaattaattatcagaatataataagtgcttatttattatctgaaaaactaggaagtaaatatttgattcattgattgacagccttttttgccttctgtaggagatcagtcagggtggcgggaaaaactgtggaaagatgcaaaccttcttggaaggctgggaggttttacaaaagcttcggaaaaggatttggctgaaggcagccagattctcttatccggtgcctaaaagcttaggttagatagaaaggggatgaggggtgaccatgttaattacccacaagtgtgttgactcaaggcctctgtcattaaatctgtactaaataaatgcctgcagccccagcttgtcagggctgcagctgctacaactctttctgtgggttacctggtcccctagcctgctctttcattggatatctgggtcagagtgcattttctcatctgttgctctgtcagggtctgtgggtcagtcccggcarccttcctttcttgttagaacagtaaaatatataccagggtttggttttataaaatagyttctcatttttgtcacggaggcagtgctgtttcagttcagtccttatagcttagctgaccatttaggcaggatttcttaggccagaattttcctcatcttgaccttaacctttcagagccaaaaacttcccatgaccctgtcttgatcacacatgtgtgtgattgctgcaggtgacagcagtaaggggcggagccaggtacctgacccaaatctctgatgcctaagtcagtgttatggcactgatcaagttccttatgtcaagatgaccatcatattccttcattttttgaaaactctgtatggatggccagattataaatggaaaaattttgagcagataatttaacaaagaagtattggcccgactatcttgataaccactatcactgaactgtaattacctatggcatccagtaaggcagtggtacccaacctttttggcaccagggactgattttgtggaagacaatttttccaggggttgggttggggggcgggcggaatggagayatagtcagtatgggaatagttttgggatgaaactgtttcacctcagatcatcaggcattagattctcataaggagcatgcaaccgagatccctcacatgtacagttctcatgctcctatgagaatctaatgctgtcactgatctgacaggaggcagagctcaggcagtaattctcactcccactactcaccacctcctgctatgtggcctggttcctaaccagccacggtcgggtaccagtccacaactcagtggttgggaagccccaaggcatcatcttcctcaaacagtcctagaaatcctctgaaacaatactttggactttctgtacaccatcgattgagacattgatttttgtagatgtatgtaacattaactgggctacatgtttttcacattggcaagacctactagattttctgtttgattctttctgccttcatgtgacaagctaatcytgtctgttttgatttgattttactagtgggttacttccagtgataagcttagctccaaaatatgagggcactgttcttgagcttcttctttactaactactgtgtatagttctaaacaccatagttttagtgtcattttttttatttggaactcaataaccaagatggtaatcagatctgtgtatattattcccaattgcaatcataaatttactctaaaagttttcttataaatgtatgcatattatatcagaatcttaacattattacatgctttctatatgattttgaaaaactataagcacattataaaactttctatagtcggtgcctctttcttattgagatttaaagggattcacttatataatgttagaaaaaaargaaaaatcatataacatgttgatgctgttattaaagaaaatatactagtccagtcccactgtgcctgattcatttctttactgtctgcaagatttactgaatttcatactcattcccgttttaaaagtagttttctttcttatctgtctttggattcacttccctcttcgaaaaagataaattctaaaagccttataaactaattgtgtggtttcttctttaaaaacacccctcttgggcatgcggaaagyggagaaaagagataatggtcttccataaggtgtaatgtggcagctgtcaaggtggctttattcaaagacctggaattaaactgctctccattaagaagtatcctgtgaggtaggagtggtggtcagagccaataagaagggcttaaaacacctggcaggagatgtctccttacagccactgatataacccatcaaatatataataaaaataatttctttaaaaatggattattgagattgaaaccttttttcctgtggaccatttatattgaataaataccaaggagcaatataacaaaatacctttatacaacactgaggctaattggaagaatttgacattttatgaaagaccaagttccatyactgccattcttttcacactactttaataaataactttctgaataaagagccttttcttttcttagcagttggctattaggaattgtttccagtttccgtaatttttattttggctcttaagatttcacgcttcagacctaaggcaagcagaatgcctttgatagcagtatgaccttttttttgtacaaagattacacaattgagcaaattgcgtagccatgtagccacatgtctttattttctgctgaagttaccagagactttgctgtagcctaaatatagacctttctcatgaggcatccactaaaaattagaaacgtaataatttttaaatgatcattatatttactttacccaagtatattattttctacaaacacatgctttatggtcttcaaggagaccatacattttataaatgtattattttctataaagtttcttctctattgaataaacaaaaaggcactctctatacttgtgtaaaagggacacaagtatgtcccttttgttgtgtgaatggccattataatgataaaaagttgaacaaaagaagggctgtcatttgtcttaagtgaggcattgataaagctcaggaaagattctctttaatgaaaaaagtaaaatgtggactcacattctctatcattgtgttgttagggatcacttgggcaagctactaacatacttccttctgttattccacttaaaaaatatgtatttcatttatgtatctatctttcccttcaggctgttagttcttggtgataatartaatagctgtcatttagtgattgcttaacatgaacttggtttatgtgttttgtctaatgattgaatcaatgaatgaatcaatgaatggattctggaaaacccagacttttagaaagcctataatctagcatgaaggaaaaagaaacacagatcaagctccttcaatacatttaataagattttgctttcttttcccttaaaatgatgaagaaactagaaataatttgagagttgattaaatatataaaacagcctacaaactggtgatagagccagccatgttgagggacactgagataacattttcattgtcagctttcatatttgtgactgtagcaagatggagagcattgggtactagagagagagagatacctaggttcaaattccaggtgtgtgatctcaggcaaatatgtgacttatttgtgcttcagtttctttctctgcaaaattaggataataaaagaatttacctcacagaatcagagcaaatgtgttcctggtacatttgctccattaagtattagttattgctcatagtggcaataggtgggggagggaacatcaattttcaatatctagtagcaataccattgaaatctttatgttcctatgatgttccaagcctttttgcactagygattccaataataagcactcaaaaaattatacactcatttttttggccaggcgtggtggctcacacctgtaatctcaacactttgggaggccaaggtggacagatccttgagctcaggagtgtgagaccagcctggccaacatggtgaaaccctgtctctactgaaaatacaaaaattagctagcgtggtggcatgcatctgtagtcgcagctactcaggatgctgaggcaggagaatcacttgaacttgggaggtggaggttgcagtgagccaagattgtgccactgcactccagtctggatgacagagtgagactccgtctcaagaaaaaagaaaaaaaagaaattatacactcatgtttaaattagcttaagttgaattaggtaggtggaaagcttactgggggaaaatatgtcatrttttgtaagcacaaaaaaagtgtaaactttttattcataatgtataaccagttctctacttatggggaacaatctggaattcaccattttcagtaacttcctacgaaagcagctaaaaattggaaaactttttggtcactgctttctcatcctgggttttcagtgttgttggaagtgagagaatcaaatcttaatgattattaagacaagctgtaactgatttttaaaaattacagcaatggagtatttgttgtgcagatgaaagaagaaactcaattattaaaatttttcaaaagaaaataaattgaataattgaactttaagagaaaaaggcatgtaccacaacatattggttgtttccgccatagtatagttcattactaatatgaatactgtactatagctctatgccaaattaaatttatatgaaatagttctgcataatatggagaaactgattaggtactagatgatttaaaaacccatttatttattcattcaatatttaacccctattctatgcaggcattatattaggtgctccaaatataacagtgaataaaaagtcatatataagataattatacaatttgtataattacaattaggaaaaagaggtgggactgtaaagtataaaacattgtgaaattacatagaaacatattctagagtgaatggtctaagatayatgtcattatccagatcttttcatatgtctcaatttcatttcttggtgctccactccttcctaatcagtgctttaactttcacataggagatgtggcaagtctgtgatttcaacctacactgtaattcaccaacctgtaggataagactacacttgggttttggctacatcagtactacaagaaataggctgttttaggaaagccataaaacttctctagttttcagaccattatttgagccaaaaatttaaagcccagagcccttcattttctttctttaatctctctgacacagcaagaagcagccaacccacttacagtttctgcccatcacactgtgatatggcagtcaccactgggtccacaaaaaggcatttttttctaaactgttcacttaaaatgactgttaactactatttactaccaataacctatccctaatgcagtggttctcaaagttcagcattcatcagaatcacctggaaggtttttgtaacgcagattgctgagccccactcccagggtttctgattcagtaggtctgtgttgggacccaagaatttgcatttttaacaagttcccagatgctgatgctgctggtccaggaacttaactttgagaactgctgctctaatggaaacggatcccytctgccttcaaactcatcaggtcaaatattcaaacttttgagagtctgttgcctacacatgctttcgttgcaaaatagagcatcaacagggttcaactgcaggtagtagsaactactgtagctattttaagcagaaaagaatttaactaagtactttcaaatcattggaaagggtaggtaagtcatcccaggaataagtcctagaacaaaattgctgttctggctcactatggaaacttctacatacataggccagagtcagaaagctgctagcagaactgcaagctgcaggactgcagtattccctctagagtcacgtccccccaaaataatgagtttcccatgtgtcactacattagtttgaaattcaagtctcactcaagtttgcctcattgccgaaaccaaatctatctggaatccaagttgcaagagagtcaaggaaatgtatttttgttagctgtctagcctcttcggaagatgaagactcactagaaaaaggttgaaacagatgttaatggagccttgctatcacaaggactagtgaatgtttccctgatgcagctgagacataaaaaaagttaaagaattagctacgtgaaaacatgggaatatgcattctaggcagagragaaacaaagaggcctggaagagagccttctttttctctcttgtgagagagattattaattaaccttaaaaacagatgacaaatacatagacacttcccccatccctgaaaaaaaaaaatgacaatttcagaaaagtcagtttttaaaatttagaacattattgcaataagaagagaggctaccacatattgagtctaaccctccactactttaacccagtagaggctagkgtcctccatttaagccaggagctgtgaaatatccctcctcctacctgtgaggaagcaggaccaaagtgatgtgtatggaatcgagcatgaaaaatacaacataatcttaactgccaaggtgcacctgtccatgtaccttaaatgctgagaaaaccagagattgagtttaggccctgtacaggaaagtcactggcaagatctagatgccacttacagtaaggcatttggttccagagtgaggaggcagtaagaggtgcttgagccctgtggatacagagataaatgtattaatatatcagagaatgttaaaccttagagatagtctactccaacttccttcttttacacnttcaaaaaagcaggcagagagattgaacatcttgttcagggtgacaaagtcagtggaacatctggactagcacccccaatagccgacattcctttttatcacttgcttcaccttccttttaagtttctgtttctgatcatcatctcatgctgaaatgtaaatatggtagttgatctagcattttgtcagctgcacatcagtttactatttagctcatcagttagatggtatttagaacaattagttttaaggtcactgcaaaattaaaatatttttataactctcactactgctttaactcaagacattcctgcactcaaagattaactctcgttccactcttagtgacttttyatgtccagagttgaattttttttaatttttaatttttgcaagaatggtgaaaagagggccatggtattagaaaaggatcataaaaagacttatgatataattcctttaaagagtcactagaggcccactagtttattagtttgagtggcagatacaattgaagaactcagaagaatacatataccatcaaattgtttgtcagattgaatctttaacccaatgagctttgtttttttattttttttttgcattccatatttggttaatttgacattaaaaccatagtcctgtaagagcttaaccatatttgaattaaacactaatatctaaactaactgttttgtccaagaattcagagacattgtgctctcatataaataagcaatattgggtggtattaggtggtatcacagttccagtggttttgaattggattacccaaccataaaaatacatatacatatttatatttatagtaccttattgttttacagactctgtaaaatatgttctttctgttaggcttcaaaaccgtaatgcaataataaaatcccctgaagaaaatcaaactcagaaatctaaatttgctaattctaatgaataaaagtcactaaaacaagaaactgtgaaaatctggaactgtatatacatcctatgccagaaataccacatactttattccctgcttagtaaatttatttcctgctattagtaaaatgtacaatattttatcctacaatgtgataagtaaaaataataggtaattatgttttacttaaaatcacctttatcccaagcctttctaagttaaacagaaagttgaattctcttgtgatggtcaaagaagcagagtacaagagcttgaaaggatttctgacttctcatggcttgttaataatagatcccagaattctgaacctgtatatcactgaccacaaggctcttatggaaaatgtttgcatgtccccactgggtcagctcagaatgtttgagttgtagtgtggtgtgaccaaacaatcaaaagaaaagattmttttctcttagtagagagagagattaggaattacagtagataatggaaagaggcacaagctatgctggcttccatcctgtagcttttagaatgttctttgtgaaaggaaagaaagaaaacttcctgctgtaagaataatgatgccctaaggaaaaaacatctgttctcctgtccattgcactgtattttaaggaaagcagctgttatctgctttgagttaaaaggtgggcttttccccacctccacacttcccaaacttgagttaccgctccatctctgatgttggaggctggaataaacaactaagccctttatctaaacattttaaatccttctttcttcccctatttcggcccacacattagcctatggaattgacttaacagaatgcatattttctggtcagttttggtcttgggaaaaaattcttagcttgaatgaagagggtgacattcatggaaagtttaaacaagtctggtatatgtaagtgaaatctgaagtccagaataaaaaggagaatgtgcaagtgccttcagatttgtagggaaatctactttagattgctccataagattttattattttgaccttttgacttcccaaaagcaaagtagtgctatctcagatactcataggaaacttaaggggtttgagaacctggctgaaatttaatttttcttccctctacttcaaaccacrtaaaggcctccgttggtccagttaatagcctgatctagctaaaacagttaacaaagtgctgacagggtaaatggtccaaggkcagaggagtggaggttcctttaaattcccatcccacagggcccagcaaaacatctaggagaggagcctgtgcgctctgctcagtctgagggagccagggctccttggtccaaatgaatgttttttaataggcacccaggtgattcttatgatcaggcttgtgtgaggcaagtatggtgggaggcaggttctgctagtctgggcacaggatagtcttcctggactggaggcctggcatcctcattccttaactagctgggctgccactggcaagaaaattaacctctttgtgcttaagttcctgtacttgaaaaatggagctagagtgtccacttcataaggctgtcctgagaactaaccataaaatgcttagaacattatcattacccttcttaccagatgatttgcagcccagagcactgggatggttccagaatatttactcaataaattataaatttcttttgagtgaataagactggggaggtataaaggagccagatcactagaggagttcttagtgttgctcactgttccaggtacagtctaagggtgacaactcccttttctccacttagcctactttgaaccataytaattacccttatgtggctcagttttaaaaatgcagagagtggagttgccactgtacaaaaaggtttctagtgtctttcattaaaaaggaaaaaaaagccacaatatgctatttctctgcagcaaaacaagaaaaccttgcaaatcactgctgctttaattaacagcattttttttttcttctttccttacccaaggctgctgtggtgccatctgcccagacccttaaaattactgactttagcttcagtgactttgagctgtctgatctggaaacagcactgtgtacaattcggatgtttactgacctcaaccttgtgcagaacttccagatgaaacatgaggtaggaatgcagcaacatcctttggaaaagtctatgtgtatgtgtgtgtgtatgtaagagagagaattggttttgaatgcaaatatggaatagggatttttacattttagtgattaatatactgtcacctaatatatacccgagacttttaaagaaaaattatcattatcaaaaagacatttaatgggctcctagcatgtatcaagtatcagggtgaagactaagggagagtgttcctaaaaataggagcaggatgttcaaaggcatgacagcagagattgggggtgagggccaggagtactgttgaggggtaagaatggcaagagaagcaatggaagaaggtgagaagcaaatgatacggaaccttgtaagccgtacagatgaatttggattttaccctgaaaacaatggtgagtcacaggaattttatgcagagaagtagcatgatctcactgcaatggttataacaatagtgtacagggaaggaccgaagcagagtgaactcctttgaaaatgaaggaggaaataaaggggcctgatgggaggccaagcttttagttggaacagggtcacccatatgggtgaagatgaaaactgattttaacctctgttgcttaccttattcacttctcagaaaatagaaaaacttaaatatcttctaatatcagtttggagatactagggaattccgttgtttcataatggctatgtattataatatatagcatcaaagaataagaagcagcagaaaggactatttaaaaaaaagaattcagtaatcttgcctttaaaaattactttttctgatcagttgaatgtctagtctccttgtacagatttcctatctgaaaatttaaatatcttgaaggcctccactatttagcattgtattaattcaggactctgccaggggcacatttcagcgatgagttgtccctgctctcaaaggcttcacagaaatgaaaactaagagtgaatatagckaagattaatacattgtcatttatggtattattggaggcccaaatctggttcttcctgaatttaaccaaagtttatgttactctttcttaggtgaaaataaagaacaattgtccatagactcttacctaataatactttactcttgttagagtgcgttgattaagggatatcatgccatttaattatttcaacaagttctctagaaaggctgttactgggattactgttatccccattttacaaatgaagaaattgggacagcatggtagagtagaaagatcatggatttttgagtcatacctctgctactggttagctcttttttcgttgggcaattaatcactcatattctcagtttccttttctgttattaggggtaatggtattattctccccatgggagtcttacgagaattatacgtgcatctgtgattatctatttgtatgcatgtgtatgtatgtacttatctataatattctgtttaacaaacaggtgtagagtccatgtcagttatcccattcttaggccaagtttgactggttacatcactcatcaaatttctcaatagtaggtcataaggctctttttttaaagccgtatctattgatgagatgaagatctcatttggagccagaagttctatgtgaatctcacttctgcttcttgctagttacaggactttataaacctatatagtatctcaaatccttttccattcctgagtactcccattcttgaaactaataatgattctgttgaaaggacttggctagagtagaggaatgtgattcttgtacttttaaatgaaattcatataagttgatttatttctctttggcctttagatagcatttgagggttaggtaatgaagataatcactcaaagtttctgtagaaatctttattcttaccagttgttgggtttttatccatgaggaaaatatttcctcttaatgtctgattcatcatcctaccttttctggttgaataactattattctaattctggccaacatcaaacttgaacattgccatcattctggctggccttccttccttagtgcctcttctgttttgtttctttcagatattattgtcagtataattttaggatgatgaaataaaaatgttaatgctagagaggatgttaacatcatgaagctgttgtgactaagaatatttcatattgaaavatcttcatgttctctgcatggcttctaaatctttagttattctcctataatgactgtaaccattgcctcttgctgatctctgaaacagattcttcattctgctcaagccaatctgcatgtgctgtgcttattttcactttttatcttttacatctcattcctccctgaataatgtctgttccactctctaccacaacaaacatttctcttcttcagagcctgacttaagaatatctgtttgtaagagaaccctaggcttgacttcatgctgcttcaattgctatttggcaatgtataaacttgctctcaattttatgtttatttacttatttcctttatatatgcaattttgttatttttcactactgattgagtttcttgaagcaggagctaagctgttttctgtttcttctttttctccggtggcatcttgagttcaccactcaggaaaccttccataattgttagagactgattcaacgtattgaacatgctctgtagagtcatccaaactgcaaataagtactcagtagtcctgtacaaaatactgtcttacaaattttaatggtgtccagcatatccactgagaacttaccagatatgaccataattttcttgtatgctgttgagaacatcctggtaacagaatctaaaactgtacttaaatataggtactaactactttgtccattgggttatccaattctattaggtccgtcttaataaaaggaaaatagagtagtccattaggaattatgtttcatagagtcattttggtcattgtttcacaatatatggtattatatatttaattatatctgtacatttatgattagtaaaaagatatatccaaagtttaaatttctgggttttcctgttttttttcttgctgctttaattaatcaccagtaattttctgcaacatattttctaaacatatcaaagagagtttatagatcttacttaaaagtctctcagtaagattagtctcccagtaagattcatccatcaccttcctgacagactctattcagatrtgaaaaaatggtgtaagaagctgcagtatgcttggggtgaacacattcaatcttaggcacacagaaatcctccgcttggaatatggcaactcagtgggtaaaaaggttaggagacattagtgttctttgttatcagaatttcctgtaaactgagcaatagaacaggaataaaatgacctgaaaagggaggatatggaagcattgatttcccaccaagttctttataagcagtttctaccgacaatgaagaaaccttgtttttggcctacttctgtagctaatcgtattgtgttgaatattgtcaaagcaacattcttttccctggtactttttccatttcccagggcaatgttctttgtgtttgaagcaactccagtgatacatgtagggagaatcacatatttattttacaaatccccaaaagtatagtaaatcactcagatttgaagagaggcagattctgatgctaacacagaccatgtttagggcccatgagtctctggggattttatttaatacaccacttagaagttgaattaaacccaactcttgagacttgctgaagtctatcctgcccccggccatcttttaaagtgttttttatatggaccccagggctttatttggcacattttttttttaattacttctttgtaaccaggcagtaactacctgaataagtataatttaaaaggacaaagagctaatgacggcattgtcttgtagctccaatttgtcctcggacatgtgctatataccttgttactagtccacccccagggccttgcactaaataccttcacggatatacaacatgagagcatgggaagaacttgggagtggccgcttttatggctctcaaatggtgaattcatacctatgtgaacctttggactctcctagttggtgacacatggaaatggcacatggacacatggaccttttattaaaaaaaaaaaaaacctacccagtgccctaccctgccaaaaatacccttcttagggatgtcttgtgttttatatcaatttaattagcatggtacttaacatggtaggctgygragtcaaattgctcaagttagaattttggccccatccctaactaacaatatgaccttcagcaagttacctctctgagtgtcagttttcttgtctgtaagatgatccaaatcggagtatcaggctaaatgtgaatgctttgtagtgtctggaacatagtaaatgtgtgaagatgttggcaattattgttactacttatgttttattccctaaaggttctttgcagatggattttaagtgttaagaagaattatcggaagaatgttgcctatcataattggagacatgcctttaatacagctcagtgcatgtttgctgctctaaaagcaggcaaaattcaggtactttttagagccattcatatatctaatacattttgttgcttagtagtaaaatttatagcatattctttcaatttcactttaaggtgcacaatgatttaaaataatatttgctgccacttacataataagttatatttcgttaattaaagaggactaatctggcaaaactacttcgttgctaattttcttccatatatgatatatatggcatattagaaaaccttcaaaataacttcatgttgcacgtaaatagtctttgggcaaataaatatttccttctgaggaaaacactgccttattaagaaaaagtaagaaaaagtatcacatttctcttgttcacattcaacctgctccatagtagaattcctcaaaaaccacctagttcctgaacttgcttcattgataagttaggggtctgtatcgcattttctctggagcactcagtaaattttgtaagtactgtttcatagaaagggttttggtttcatatacattgaccagagactgtttaaaaggaagatcaatgcagaaaacgttcaagtaattcgttcctttccaggccaaattttatccatatctctgtccttagattctaacttcagtgggaatcgactagttattctaggtaagtgattccaggcatccatcatataactgtttttaattcagagcttccctgcctttttctttttgtaaataaattcttaaaatgttattctctgtctctactttcatagggtgcacattttaactggctaaatctaaaagaagtgattgttattaaagaagtgaggtgcawttaaatacaatagtagtattttcctaccttagcaaacacgtgtaggttgagtatcccttatccgaaatgggacaagaagtgttttggacttcagatttttttcagactttggaatatttgcattatacttactggttgaatatacctaatctgaagatccaaaatattccaatgagtatttcctttgagacttattggtgctccaagagcttcagatttggaagcattttggatttcagattagggatactcaaccagtgtaagaaatcatgtaaacttattttggggtagggaaggtcacaaggattatcaacactgaaaactgtcctagttctctgtgaggaataacaaaatgatgatttttgtgtttgttgtaaaacctatttagagtactgagagttctaggaaaatacagctgatgataattttaacttgtgttttttgcgaatgaaggggaacagtattaatgataatactcatagcagatactaaaaaataacctatatttagcttgagagtatattatgtaactttttaaagccaagttttcatttcaaatcattttctttctattgttttgcttgaattaacattgtctgcattccytaagkwcacagcaactgatagcagagagtgaacagaatctgcagggaattaaaagaggaaaaaaacaattatttaaagtttattatgattatttcacataataattaagaattagcaatacttactataggtggacagattattaatttattgaggcatttcagcttttcctgttgataagtgacatttgtggtgatcccattctgaatgacaaaggacaactaattccctgaagaataggattctagggttagtcctttgtgactatagagaagtatgtatgtaaagcactgaggggaaaaaaaagattactgaaaagaggtaatataatgtccttcaccacattatatttgttctctctttcctccaatgtctttggtcatgcagaacaagctgactgacctggagatacttgcattgctgattgctgcactaagccacgatttggatcaccgtggtgtgaataactcttacatacagcggtaagactttcccagtaaagcaagaaaatgttttcttttaattgtagggctgtctttttttaagttaaagccacagcaaaatttgatggtcaaggtcccataacatactctggttatatttaaaggaaatggaaaaaataatgcaggttaagtattatgtttataatttttcagccctgaagttcaaaacatatttatgttgagaatcttatttcattagataattaccaggagttttactttagtttatatatatccagcttaacagcttccttagaaaactattaagactagtttagaaaaggtaacattttaccctacagtagaaaagataatatttgaaaagtgcttagctcggccctacatacttattaagtgctcagtagaaggaggcttttggtcttagtggaagctacatagcactctgttggaaaactggtcctctgtctaatttctctataccgttatgtcctgatctgtaaaatggagataatagttgtaaaagataatgcacatcaataccaagcagaatgcttggtacctatttaagtcttaaatattagaagcagatgctagagatgtactgtcatcagatgtctgctcattgactgagtttgagagtgagacactatccgttaggacaagtgtcaggctcctttaagagccatacttaagtggcatttgagatgacaaatgagaggataaaggtgacatcacttttcatcaaatgtttgagccactgtgatatttttattttcttacaggaatttagttgaaaggtctacattttaagtgcaagatctcttactactgagcattttttaagtacacaagtgattcaactaatgggcagatctctcaaggaaattccagatgtctgatatctagagggaatttcagaaagctctctaatcacattcttcttatctaaataaatggaaaacttcatgtagaaagaattgtagtgatgtaacaaccatgtcctctgctgacctttgatgggaaaagatagcaagctcttgcctgagtatcagagtctggctgtttcctcttgaaaaatctcatgttttggagaactgactgggtgacatgtcctttgtcccctgtgctttgtcatgtgattgcaatcctgagcctcacacagacacagaataattatgaaaggggacactgatatgaaaagatgtatagtacagagtcaagccacatagtacgcctctccacagtcagcacaaccaaaagatcagaataagcatgtgctacactgaacataatattattagtatgtgtattattagtgtatggattgctctaagatgctatattgccctgctttagagtgaaaaaaaaaacactcaactattttttcctttgtttatttaaaaataattaccccaaaaacatctggagaaacgtcatcttctccaaaaaaaaaaaagaaagaaaaagaaaaagaaaacatcctgggaaaaagtcattgactgcagaatcttgctttcacacacacaccacaaagcagacttcaactttaaaaaaaaaaaaaaagttaaagcagtttcaaagatttttatttcttcctacatccctgtggtttcagtagaggaaaccaagaattttccagggatttttctttttttttctttccttgttggtaaatgagtgatacttaaagtagaattttcttagccaggagacccaggaaactatgagtaccataaatattcccatgtaaagtactatcttctaaaaaggtatactgtgtccagccctcatcagatattcaaactaatatttagagaaaatcaaaaaataaaacaatgcacagagatgaaagtaatttatcaaaaagagaaaaatggtcatgtggtggcaaaattagaaactgagattttcctcattcattcttgaacatcttttcagaaaattaccctgaaattaccttggaagaagatatttctccaatagaaagttgccccttgagtcatcatttgattatttgatgccttctttgattaggaaactaccctcgtagaggagttctacaggtatgccagtggcatatatgagagaagagttcactgctcatgcttacttctcccacttgggtgaatcaagaagagaatgagggctgggcgcggtggctcacgcctgtaatcccagcactttgggaggccgagacaggtggatcacgaggtcaggagttcgagaccaggctggccaatatggtgaaaccccatctctactaaaaatacaaaaaacattagccgggtgtggtggcgggtgcctgtagtcccagctacttggaaggctgaggcaggagaatcacttgaacccaggaggcagaggttgcagtgagctgtgatctcgccactgatgccagcctgggcagcagagcgagactctatctcaaaaaaaaaagaatgatctcagatagatactgaattcttattttaaaaataggcagtaataggaacaaaatagctaaagtgcagacaaccactagagaaaacacaattgtagcatttgggttatgtagagagattacctgcattaggtctgcattcagtataagaagactgttgtagatgcatttatttggttagattcaagtttggtgttgataaataatgcagtgaaattatgttatattctaggcagatagataatgaataattattatactagggcttttgccctttgcaaggcagaaagaaagtgatagaagtataaaatgtgattcttgccattaagaattgtcatagtctcatgaagtaatagtgatcactacaagaaagtatctagtcctgagttatttagtgcatggactgtaagtgttcagcagagaaaactggtcaagacagatgtagtacatctccattgttaatggaggaaatgagacttaaacttggtcttaaaatgtgggtaggatttagaaaggagaaaggataaatatatttcaggagcaccatgaggtaagcatgttcttggaatagtggtgatggctagcttgactagagttagaaggttcacactgattaggaatgaaaaagaagagaatgaacaaatggaaactttttgatgcagggttataaaattaaccagtgcattatagatttgatatgggtgggaaaaaggagccactgcagtgtgtaataaatgcacagttttaggaaggaagtctgaatgtaagctacaaggtgaatgggtagaaattagaaccacagagctcaactagaaagctgttacagcaagtcaagtataagctgaaaaatcacatactggctagagagaggaagagactgaaggagaaaaaaattttttaatttaataatgagcagctagttatatataagcatgaaggaaggagatatgacttctggtccaagaaactggaacagtgatggtgccattgatgaaaatgaaagagctgggaaatatgtatatgtgtgcactgagagagagggttggcaagaatggaagttatgggagttttggyaataagtccagtagaagataataaatagggtggtagttagaagtggtaaaatgatcgaacgaatgtgtttttttcaaggttagagatgcaatacaatcagggggagaaaaatctcctggtagccacagtcacactgtatatttgtcctgggagaacttgttctatcccatgactgtcttctctgctctaatagaggacagaagtgagctgaagtcatggtctggcacagtgggaatagagggtcagcaggatgtgagagacttaaaagggcactacacacagcacaaaatcatgtgtgaagttcaaactgggtaaagtccattttacccatgaatgagatgatctctggtcaggttggagatcttgagagcctggagatctgactatgaataaagtgaaagttcaattcaattagtcctatgtcagtagtaaatantaataatagaagctaaaactttatataggccttatgccatttgaaacgtttttgcactttttatatattagttcatttagtccttataccaccatgcagtggctgtgatggttatggtagttaagagccaacttgagccagatgccyagcttcaaatcttggcttctctctcctcttactctgtgaccttgtgcaagtcattaaacttctctatgtccctgtttccttctttgtataatggaataatgaaaatacctatcttctgggattttcataaggattaaaggggtataaatagatgtaaagtgcttagaacatttcctggcacatgttaaatgctctacaggttttagctattttcacaggggaatgttcttagcaacagataggagttcaagatcttgctttgtcctgtggtgaataaagggagtggcaaaaatactgtgcccagtagaacctagtagctgtggaacaaagaagcggagccctgtccatcattatgtgcaaagagataatcagtagtgtcaaggaggtcagagaattctgaggtcaaaaggtgaaatgaatcatcattatgaatatttatgtcattgaatatgattatagacaatgagaaggcaaaaaaaaaaaaggttgattgggagaagaaagcaatagtgatgatttgaagagaaatgatgaagtaaagaactaaatgggattgaaggttacaaagaggttgttagagaattgagcccagagtaatatatatggctaagaagcagaaccaaggatgttgtttgttcttggtgacataggaagactggggtggcaatatagtttcccacccccatggggctttcattttctatagatttctaaggctttctatttttaaaatattggtctgatttctgcattggacatcctaatactactgtcagagatggaccaacaactgtgcagaacagaggaaaatgcaaagtgagtatgctggtccattagtgctcactgacagcagtgtgagaacaaaattctgtagcagtagtggtttaaatgggtccttctgatgcaaccttaaataaagaagccacatagccttgtgtttgaaagaggaaaatacaacagatagagaatacactggtttccatgaatgtttttatatacaggaaattcgagtcatttgtcactctgttatggattcataaatctgtatttttagaatgtaagtaaaggcaaacacagtttgcattcatctatctcaagccaagaattttctctaatgtgaaacagtcccttctgcgtcgtctaaaaatgtaatgtgtgtttgaagttctaacttgtttgtgttaaataaccacctaattgcatttcgtagtccagcccctaagtgggtcaatgagtggatactgtgtgcctttaaagtactttggtatcctaagacagtgtgatggkttgaagaggatatacttgaatgccagctctaccatttatatcaaccttgagcacattatttttcactgagcctttgattgtctagaaagcaaaaagatggcaactttagagaggtctcagctgaggttaccctggagacacaacctgagatgaaagtcagtgtgcatataggctatttgtgaatatgaccccagggagcaggaatgcagaactgggaaggaagcagggaagaaaggaaaggcagtagagggatgagytatccagatgtccacccatactggtgcttagtcttcccaggcacttttgaggagtcttatgaaataagacccagaactgttgactggcaagacaaaggcagttgtccctaggtctttgtacccccctggtccaaggtggtccacaggccttcactctttgacactttcaggwtgaacaagtatgagtgcagagaacattcctctgggcaccagttgtggggtcagaaagctctaaggcagaagtgagaggtattaaagataggctgggacaaaacaccttctaattggtacttgcatgaagtctgttaaagcgtgcatgaaactggacactacatcagtggatgagtaagaggtgggattgagggttttgatgtcgtaaatgggcatgccctgcacaaggttattgtaaaaattaaatataataaactaaaaaaaattaaagcaaactacctgacatgttgtaggctctcattataggccatctccctggatgatctcacctactcgcatgccaggattaccatctgcattgttggtgcattccaaatctatatctccagyccagaactgagttgacatttatatccatttggrtatatttcaggcaccttaaaatgaacagatccaacattcagctagtcaggttcccctgcttcatcccccatctttaatcatcttctcccttttcctgtgtcagtaaatgaggtcagcatcccaaggcagaaagtttaacattcatactttttccctttatctccctcatcccctyatctccctcatcccactcctagtcaggagtcattaccagttcctatctgatctactcttaaacagctctcagatgtctgcttctcttcctttgggctgctaccactctaatccaggctctctctgacttagattactagaagtttcccagtagtctcctaactaactcccatagtctcgatacatacgcaatcctgtttccagtaagttcatcctttttcagaaatatagtcctgttactctgttcattgtcatcccattttctgatgctgagcacagtacctgatccatagtccaactcactaaatatggaaggagcaaagaagacaagaagggcaagaattaatttgggaaaggttaggacaacagtaaatataaacaacactttaaacaataagaatagatgagattatctgtcctattacctttattttcactttactattttctttttccctcagatttctctcactttacccattttttcccccacattacatttcttcagtcttaggtagcttctctatcttcaacaaattaaatgcaaagtaaaataatcrttcagatagtaataggaagaaataacaaatcagttgtattatccaacacttgtatatggagctttacaattcacaaacccctttcctataaattttatgaacagaggctttcagaaacttcatctttttcttatgaagaaatagtgaaaactatgcttaatattcacgtgtgaagggtcatgagaaacatgaggtggaggattgtgcttgtcgtgctttaaagctttatttgtgactgtctcagagatataatgaactgagtataatatcctttcctttctcttcactcagccaaagggtctctactgcttcaccaagttcaattagcagaactagcaggatattctgcactaaaatgacctggatcctacatggggaactttccaactcagccgtctccttccttccttccttccaagggagcatgtacactgactatccctctttttcttgcctttcatcaatcatacctcagttaattccatctcagtcagtccttttcttatttgcaggcacacatgaataagctgaccttcagcctgagcattatttcagaggaaaagctaacatgaatttgtttcagattttatatcaattgcagttttgaaattgaaaaatataattggtacaactatttcagagggtttttttccatgtttggaggtattaatttttttgtctttactccttacttctattttaatcagtattaaaaccaatgaaattgttcatactttactctggcaatggtcacattggtatttgaaaacaatttgactctttgtatttgtttcccagagrttatctcacacttttctcagtaaaaggagagaaaattgttagttgattaattttgtgaagtagcctcttttgtagttaaacagtaataaaaatgtactgataaatggcatattaaggaaactgatcttttttcctttcttcaacaaaatactttcagaagtgaacatccmcttgcccagctttactgccattcaatcatggaacaccatcattttgaccagtgcctgatgattcttaatagtccagtaagtacctaatttattgttgtggaattttaaaagagagctttataaattcagttttatttttagttcttggatttattcccagcatcataaattcttgcacatactttattcctttttgggtaaggaaggcgaagccaaaacatttgagatcctcacagcctcacttctctagacaaccagaactgtctacatgttgcccaataagggaaatttggttattctactctacgtggctattccaaattagaaacaaacaaaatgtgtattttgtggctctcagttaattctgctttttttgtttaatcgaatgaagtggtttctatagctcaagcatttgctttcacaaagcaataccctttcttctttttattgaaacttccagtcactaagagaggattttattaaagaataaagctatttaactacttggtgaaatgaatatttatcaacataagaaagcatatgctatgctatgctaaacatacttatgttaaggaaaacaagattaacataatatgcaccaggatattaacaatggctgtgctggtgtaatgaaattgttaatctttgtttgggggggatggttgttcattatttacattgtcggctgtgtgtatgtattaccttaataataagaaaaaatgaaagttttaactattacattgaacatacacaatgcatgacatataatcttaaagcaattttacaatattgctaagtttactcagtkgggctaattctttcctgagccctggaaaaaaattcagggattcccatcacttttctggtcactattttataagtaaaagccctctagttactttaggttccaacatatagtatagagttctcaactcagaaacaaaaatgtgtactcctgggtagcagtccaaattttgaacatgatttaaagtttcaggttttctgttactgcactggtaggcttctcccattccctaccttgtgtttcttctaactccttcctctctccccaacctccatgtggtttcttacctcttcatacttggagaatgggaagggagaataggtaagaaacatcaaaacattcttaacagactggtactgatatgagtgccttgcttttagactttccagacaagagtcagacacaagtctactctagccccacctccacccactaaatgataggagacatacacaggaactccacacccctctctcttacctgaggtagaggggaacacactctcacgcctccctcaacacctcagtgtcggggaggaattaagagttatatagcctgttttggcaacctccttataaaatctgtatatggtctagtacagattgtttttctacaacatgtgactgtttaatgtgaattatatcatgtgtgattgggaggtagaagaatggtatcagtatactayagacgttctatcatttcatacacgacttctctggggtaagaggtgccasaattatagaagttgaattctgaccttcagcaataaaggaaaaagccctccctttggctcgtgcatatacagccctttccattctatcttaggaatattaaaaatgagcacttgcacctgaggctctctccctcgctttggactgctgtagcctcttggtagcttgctcttctttcaatgcccaccttaatagcagagttactgtctcaacaatcaattctatatgcattattgcagggcccctcaaaccagcatttctacttgattgtttttgtccatctttaatgtcctcagaagcagcctccagacctgccagactggcctgtccaagttacttccagaggaaccaattcttggtttagtttgtgctctggttacaaagttgcataggttttgagtggtctttcccaataccattttttcacaaaatccatgttatttttagtgtacggtttttcagaactgaaatttctcaggaatgtatatgtcatgttatagtaggaacatctgtacttttgctatctgtgtgtttccactaaaactttcatttcagtatcccactacaaatttagctccaaagaaagaaaatatgcttttttaaaagcatattttacagtattcctatcaactgacctgttactatataacttattatgtaatatgttgttacttaatatataaggaatctgattatctatatggctggctcaaattataagacctatctatatattctatctttgtaagcataattacacaagaaattatatcctcagcttttgagagtaaaaaataaaaatatagcaccaaaagacatttcatcttccacttgaaattgttttatcttaaagtaagtatcagaaggtattttctgaatagttttctgtttagcctagaatctaaaatgatttagtatttaaaaataatgtttatggttgtaattatagattattgtcattaattagatccatgccacaatttcagcatctagttatcctttaatcaatgtgttttggccccagcctaacatacccagaagttctcctgtcttcataacaaatcccttgccttcagatctcattcctaagcgtctgggttttttcttggccctaagatataggaagcacatctgactcaacttacagatgttgttttgattgtattctgagtgcatggtctgtgtattttacttagttcaagattagagaaccactatgctttaaattacagataagaaataaaaaatggttacatagtgaaaactttgaatgatttgcacatggattagctaccttttaaatattccttatagatgtttcaacccacgctttctttcaccactgaccagtaagcaccctttggctcatgccctttacccatctatattaagatgttcctaaggaatatgcactgttatcataactgaccaagttaaaattatataaatttgcaccagaaatgttactggatttatttaaaatgccatagagaagtttaaaaattttaccacttctttcttcatatccattaatatggcttttttttcaaagttttacatgctgttaaattatagcgattagtctgccctacggaaaaggatagctattagattttaagtctggactaaggcttaaggagtataagagttggaaaaacatgcatatgtaggcagatgaagcattatgaagcggtttacatgtatgacagaggggttgggtgggaacatagaggggaaactttatttcatggtatttaagtgtgtcctccacattcattagaatactgggcatgtgtttaagatatrtgaatatatttctagattttgttcttgtcagcagcttctccaggatgttaatactggttttctttttttataaagggcaatcagattctcagtggcctctccattgaagaatataagaccacgttgaaaataatcaagcaagctattttagctacagacctagcactgtacattaagtaagttttaagaaataacctgagaaataggtatttgaagtcttttcattgtttcaaacttttgacatccatattgagaaatttcaaagcagaaatgtcctggcaraactgcttatcagaatacggagcagtttctgaaagggtagccagaaaagtctactcctttggcttatactgctgaaaattaagaatacctattatttctgatgtttatctaccactgtgtctctgaaactatatacaaatctaatagccatctcaaggtcagtcattccaagccatgttgtccaaagattatatagatcatttgcttttcctcctttcccttgctccccacaacttctgaccatttcaygactcctttataccgtcattcaagcttagttgggcaggaaaaggagttactgccaagcaagtaactcttgtttctttttatttgattttggcaggagaagaatatttatgtagaactttgaagttgttgattctaaaataagagtatacattagagttgtctctgtgattatgcattttcatgattaaactgcctttctaaaagctagaaaatactttcctgcatttgagcaatcataagtttccaactcctagctgagatctttgacgcatgtgtgggaatgaggggagtcagggaatcacwctyaggatttccttgtaacatgagtctctctccctctgtaaggaattcacattcatggttgtagttaytcttaggagaagtaaaaacacatagaaaaaayacaaaaacatctgccagatatctactgttatacatctagaagtaactgcatgtgcctacttaattggtttttagagcattttgaggttaagacaaaataatatatattaatagtaaacttcagtttattaaaaataattgcagaataaggattatcraattaccaagaatttgaaaaatacctgtaaccacaatgcctttctaagctttacaggccacatgggtctctcctttgaacccttatgaaacatacttttcattttttataaycatatactatcagttttattacgtaagtttttcttgagtcttgtgtctccaggtagatattaaacactgcgaaaagaaaaatttttgtcttatgccttctcaaaatgcttaacaatactgggcacataaagaggtattcactgtacaccaaatattattatattcactgaataataacaaatattattttattttaaactttacctagtctttgtttacttcagaagcacttcacaactttakatatttttatcccctaccatgaaataaatgataaactgaaacctatagatcttattatgccatgcacttaaaatacctgaaatcattctcagcatcaaatttttaactcatactgtttcatttttcttaaaataacaaatattcaagaattgaaattaccataatttgtgatctatagttaaaaattaggtgaggtttaatgttttatcgaaagcaaatgatagaagggggaaagtgaggtattaaagatttgtaaatgatgattttatagtgggctctaagatgggaaaaaaaatcagaggttttttttcaccaaaatttagtccatgagtctttgtggaccaaagggataagaccctgggtactcattataactaacaatttttttttaaacattgtaggaggcgaggagaattttttgaacttataagaaaaaatcaattcaatttggaagatcctcatcaaaaggagttgtttttgtaagtaggtttactatctttaaagctgaagttttttacccagttaattttctcactattttttcctcactgttagtttttattgcaattatttgttacaatatgatgatcttaaaagcggycagatttctccagagggttgtacaaagagtaaatttgaatatttacttgaaaagaaatgcatttgcaaatccaagtgaatgaactgttcctttgttctagaaaaacctttaaaatgtggtagagtatcaatatatggctataggtttcccttattcattttcctaattcattgtaatggaagtgctgaaaatggaattataaatgttgtggaagtaagatatagctgcaaaatgtttacttctcttaaagaaaatctgaaaaggtagagcagtgaggtcagggtccagacatggaaggaatactattaagtctctatgattaaaacagtttgatattggtggcagaccagtggaacacagctgaaaatctagaactgcataagacatatagtgtataataaagataacatttccagtgactggaggaaagagagagataagtggataaccaaatggaraaagacaaaattggatctactctacagacttaaattccaactgaagcatagagttcaatgtagagaattaaatcatacaagcattaaataaaaatatagatggattcttctataacctaggagtgagaaaactttcctaactataattcaacatgcagaaacaataaaggagaaagctgaaaaacatgattaatcattcaaaggcttttcatttagaagttaccatgtgtgttgagtgaattaggatgacctactataatttctgatataagacttttatcagtatgatacctgatgttgtactttaatggttattagtaatcaatgtactttcatcatactgtcgctgagaatggaatactaaggtgacaaaaataataaaagcaggcaagattttacccaaggttaataatttttcagtctgccaatctggagctaaatgaggcagtttgaggacaaattccaaaagttcaaagggaaactgaaacaatgatgctctgttatcaatgtattagttagactttcatataaattgtttctttttctttggtctttataaactgccatttccattgtttagagggttttaacttttttttattagtaactatttactgagggtatataataacacaaaagtaaataggagtttkgggtttcttttttccataacagggcaatgctgatgacagcttgtgatctttctgcaattacaaaaccctggcctattcaacaacgggtatgttacttagtgacaataacaataattaaaaagtcaaaataacattctacccagcaatcccactactaggtatctacctaaagaaaaataaatgactatataaaaaagacacttatatgttcatcacagcaccatttattatataatagcaaagtcatggaactaacctaactgtccatcaacagttgattagataaagaaaatgtggtacatatgcaccatggaatactatgcaggcataaaaagaatcaagtcatgtcctttgcagcaacatgattggagctggaggccaattatccttaatgaactaactcagaaacagaaaatcaaacactgcacattctcactcataagtgggagccaaacagtaggtacacacggacataaagatggaaataatagacactggggactccaaaagggggaaaggtgggaaaagaayaaggggtgaagaacaacctacygggtacaaygttcactgtttgggtaatgggtatactagaagcccagtccccaccaatacacaatatacatatataccagacatgcacatataccccctaaatctaaaataaaaaaaatttttttaagtaagtttttactcttaaaggtagcttctgaagtaagtatggaattttttttggaatttttaagtagtattaaaaacagataattggacatacaaaggcttttctttttagaagatgcatttgcacataatatttgtaagatatattaagaaagagagcatctacattagcacagttttcatttcagtgtgaaaggctgagcatacttaatgcaaaaacccaaaatgttccaaaattcaaagcattttgagtactgacatgacacttaaagaaaatgctcattgaaccagcattttaggtttcagatttttggatttggaatataacttatacttctggcttacttgtttcttaaggtcatccctttaatgaccttgaaaattagaagaagcaaaattacttttcttatggttagccttctacgctgtgcctcagctctaaatagacattaacaagtagaacatagagatttctggggcttgtagatgtaggaagtattgatataagatgtcgagaacgttctgaatggagcctgttaccaggaggctagaaaaaaatccttccctctaagtaactgctataatgttttgcagaggcaatacaggctcagaaaaagtgatggatgtccatgcagtgacatatatattgtgtttttgtttttcaagatttcattttgagtccgtaataaatatgctatttaggattgttgacagcctgctgttggtcaagactccgggctgcttagtcagggagcctagtaactcttcctacaggctcatctcatgaaacagacatgccgagaaaacaagatcaaaaactcattctccatgtgccaaagccaacacgccataagcacttaggtgatctttacctaccttcctgcccataataaacaggactatatgcctatttatttctaaccaggtaagagaatagaagagggaagaatgtgtcttcatatatcctttctctcccctgaatcaaacccttgtacatactgttttatggggggaaaataaatgaagaaaacatttttaaataaaattaaaagggaaaaatgttggaagctaccaaagacagagagatgtacctaagtgaaaaagagtataatgtaatagttaagagagcacgctttggacatggactacttgtcttcgggtatsaagctgctgcttatttgctataaaatggagatatacagctcctaacagggccttcattcacggtctctgttttaaagaatgatatgcttttcattgtcaaaactgagtctgttatttatttcagatagcagaacttgtagcaactgaattttttgatcaaggagacagagagagaaaagaactcaacatagaacccactgtaagtrtgaaaccttrttggtaggaattattcaaattgttttttttttaattgtagactcctttttatggctctatgggatctttccttaggaccamaatttctcattttattttttaaaacttttttctcattggaagaattatacatgttcattacagaaagcaaaaccaataaaaggcataataaagactcttgggttcatcatattgtatcagtgttctttgtaatttgtttttttccgcttaagtattasaaaccacttttcattttaacaaatattcttaygtattatcatgattacatgaaatcgatgtaaccataatttacctacgtcccttggtgtaatatttgcagtgttcactattacaaacagcactgtgataaacatccatcatagatgtttcactcctactccttggttctcgccatcaaaagaatttaatagagaagctgtggctgacagagaaaggaaggagagataccaaaagaaacatggaggaaagatgaccagatgtcatgccaccaccacagtctccccagttttctcagcattctacttgtttactcctttgttcaaagttctcctcagaagtgtgttcagagcagtgtttcatctatcatagatgtttatcacagtgctgtttgtaatagtgaacactgcaaacattacaccaagggaatagataaaccgccaaacctcattcttcattatcttgttagcataaattcccaaagttgtcgtgttgaagggcaaacagaatttaaaggtctttgatacatactgcctttttacatagagtatggatctcagatacaagtaaagattcctctcagcccacttctgttttttggaatgagtttccttgaaataaaacataagrgttttcctctttttttctttttgtattagttgctgtctgaccttcctaggctaacccactgattcacctttctagagccagctttgtgttctttaaataaatgcacacaatggytcatgcctgtgatgccagcactttgggaggccaaggcagtcagatcccttgaggtcaggagttctagaccagcctggccaacatggtgaaaccctgtcgctrataaaaataaaaaatcagccaggcgtggtactgcacacctgactagggaggctgaggcaggagaatagcttaaacttgggaggtggaggttgcagtgagctgagatggtgccactgcactccagcctggacaacagagtgagactccatctcaaaaaataataaagtaataactaactaaataaataaatgcacatctgtgtgtctggtctgtatttgtattttcaggatctaatgaacagggagaagaaaaacaaaatcccaagtatgcaagttgggttcatagatgccatctgcttgcaactgtatgaggtatttatatgaaaactactagacttgctaaacttggactgttgtgaattagaacctaaaattgaagagattaatattaggcgcctatattttgcttctaaatcaagaaataaaattattagcagtatggtttcttttactgatgaacatgtttgtattgaacaaggaacacatactaatatctattgagtgcctactatgtgctaatctccaacaaattgatttggggatgctaagaagaattatgtgccagtgttaccctcaaggagcaatactgtatatactatgcgttagcatattctttttttaagtctaaattttagcctaaataaagaaaagtaatccaactttttctyattgtcataatgtggctttactctagttataaaaattcttctgagattaaaaggaaggaggtagaatattgcaggttcccatttccacgtatctgctggcttggcttttggagggggggtggttattgtaggcaaatagattctccctaaaacatctaatttattagtttagatgtttatgactcaaatgcagaaagaagaagttgtctttgtctttgaaggtttaaacggaaatgttttaagttttaattatttggaaaaagaacatttgtcatggagttatcatagaatgtcaagagcagaaaaaaaacctagaaatattctaatccagatatttcagatttagtaattgaacttgtaaagttcatctcccaacgagacagactatttgccccaaacaggtggttagtgggagaggtgcatctacagtccagttctcactcctactccaggattctcgccatcaaaagaatttaatataaagaactgtggctgacagggaaaggaaggagagataccaaaagaaccatggagaaaaaaaaaaaaaaaaactaggtgtcatgtgccactgtcgtctccctatttttctcagcattctacttgtttactcctttgttcaaagctcttcctcagaagtatgaagtgtgttcagagcattgtttcaaacacttggacatctcattctttccataacagttgctttccttattgattggattaagagtttctccattaaaaatactaatggctcttttgagttttctccatccctgtaaatacagtcaacatagtaatcacctattatagatgttatccttctacatttatatatatatatatacacacacacaaggattcattttatttgaatctgctgttgaaaattctatgtgatactgacaagtatttttaatattattacagaaatagttatgttctcactatagaaaaatcagaggccgggcatggtggcttacacctgtaatcccagcactttgggaggcagaggcaggttgatcacttgagctcaggagttcgaggccagcctggccaacatggtgaaaccccatccctacaaaaaaacagaaaaattattttctattataagcgcgggtgtggtggcacgcgcttgtagtcccagccacttagaagactgaggcagaagaattgcttgaataggggaggagggggttgcagtgagccaagatcacgccactgcactccagcctgggcaatgggagtggaaccctgccctaaaaaaaagaagaaaaagaaaaatcagaattactgagaagcaaaaaggaaaataaaaccagttacaatccattacccagagaaaactacagataacatatcaatgtatatgctttatgacattttcatatacttttcatttaataattcagtaattgccttttgcaatccataatgtcattatatccatattttatgtatcaaatgtgtttctgtgaggtttctttttatttttttattctgcgggaggttttacagtgacaacctattgttgggtatttgtcattttaagtggttcactattaggaagaaatctgaaatgaacattctggtggctaaatatttatggcactataattggtacataataatgccacaccraattatgaatctttattataatataatcctggataaaagcctatttaagtacattgtatgaaaccattccctagaaaaacgcaaaaactaagcagttccctgatgcagtcacacttaggaagagccaactgtactacatagaaacaaaatgtcttttttcccctaaaagtggattccacacagatctgtctccctagcacagtaatgttattttggaatgtgtgtgtttgctctgtccctcagcatgtactccttatctgtagtgttttagaagaatcatgtgtaaatgatctgtgtatgtgctcacaaagcttgtgaaaatttcaacagtgagtctgcttatgaaatgagtgtgggatgtggccctttgtaacaggcctgtgggagaggacttatttcctggcttctctctagctgtttgctttcttttttctctttaggccctgacccacgtgtcagaggactgtttccctttgctagatggctgcagaaagaacaggcagaaatggcaggcccttgcagaacagcaggagaagatgctgattaatggggaaagcrgccaggccaagcggaactgagtggcctatttcatgcagagttgaagtttacagagatggtgtgttctgcaatatgcctagtttcttacacactgtctgtatagtgtctgtatttggtatatactttgccactgctgtatttttatttttgcacaacttttgagagtatagcatgaatgtttttagaggactattacatattttttgtatatttgttttatgctactgaactgaaaggatcaacaacatccactgttagcacattgataaaagcattgtttgtgatatttcgtgtactgcaaagtgtatgcagtattcttgcactgaggtttttttgcttggggattattttaaataattggtttttgtgttttctgaattaccattttttcaagaatgtttggaatctttcctttttcaaaagtaggttaggagcaaattatcatacattctgtgacatttaaagcctttataggatagtgaaaaatgctggctgagtggattttaagagaaataattgtatttgttaacagtgtctttttttaaaaagttaaggcactctgaaacaaatggaaagtcctatgaaactgtattgtaaagaaaacattatttaattgatatgctgttttgtgagagaacaggcaagacagaactttgtcacttcagtgcagtacatttttctgaaagctacccataaaatcactttcatctcacctacctgatgcaaagcaggtgaaaccttaggagatgatccagtcactgacttgattgagggataagtgtgatttagaaatggaatggccttggatgtctatcagtgaagaaaaatgttctgttagaagatctctctaagagtttttttccttctgagcttccttttcaaaataaaagtgacaattgtagcattgacttgaagtgagacatggttatagataagasagtacaaaatgactctttttcctgtcaattgaaatttaaagaaaagttttaattatataaatagcaaagggctattgccaatactagggtcaaaaatgaatttgagggaacagtgggtaagaaactttatgcctgaataacatttagcagtattgtgattgaaaaattgccatattttgatgtataggacaagtcaactgagatccagagaatcctggatgtgaatgctaaacactggcccttaactcacattcaatgtattttcttcccataacatttagtatagttaatattttcttagaatttgagcccatttaagtggattaatattctacatgtgtgcccctaaagacacatttactcaatattggagaagtagataatgaattaagcaactggtctaggaaaggaaaatttgtttcaaatatgcaggaatgtttggatttggggagagtagaaggagagatttgcttgatttgttaacttctacctccaacccacaaaaaagatatttgatctgagtttctatcactaatttggatagaaaatttctaagggacatggtaatccagcattctcaaggacctttcgccaaaatgtgttttccatctatgtcccgattcccctaaattttgcctaaaattcagtatgttccttaagtttttaaaattctgagtgtgtacaaatatcttgacataatgcagttttatttttatcattctggtaaaaaaacaaaaaatagaagcaaaacacattgtattgccattattttgtatttggtaaaggttaatctaggaagttaccaactgtttaatgctatatgtattgtatacttgtattttcaggatattttattttttttgccatacagataaaatttgtaaggttgcccctttgtggcactggtgtgtaaaatacacagactatcactaaaataatagttatatatacatacaggtgtatacttatgcatgcatacataaatccttagtatagaaaaattgcataaagaatagcaatctttaataaacctttttattacattgtgatttagcagttatgctaaaatatgtacttatgctttagtagtttgtttggtcccctctagtatgtgtcactgagaaattttttaaagacatggtagatcgtgtttagaggctttgtatgtgtgtcattttaataagcaagaagatatatttagattagaaatggtttggtctgcctttgaatattgtttattttactttactagttgagacattaaaggaagctgggcaatgcctattttatttctttgttggatattttagttcatacaaagcagagtacttctttagggctggttaattggttcaaataatttttaatttcctttctagtatcttctcaagttggaaaaatatacatacagtcctccttcaccttactctgtatttatattacccataactagcaagaagttcttgttctagattttttgtttgtttagttataacagagtaacataccatttaattacaatttttagccagaaaagtccccactattttactaacttgttaaaagatatctatataattgcctggccttatatttttcagtagattagaccgtgccaatcacaatcctgggtggatttgtgtaagtcacttaacctctgtgtgcctaaacaagttgtgcttttttaaaaggagttatgtttgggcaaagcctttgtcttcaagcagaatgtcacagaaggcagctactttataagccccaatgggccatggagaccactgtcagaaatgggatattagtctagagagaaggtgatctattcccacatgtcatttctaatgttgagtttccatgactgaacaaagagaatatatttattcagcttcacttgcagatcactagtgaatgtgagatttagagctcattgagtatattgcttcaaggtacaaacccaggatgatgatgttgtcaccactgtctcttaattttgaataatagtttcctttaataggagtattagagataagaaagtatatgaaaatatactggaaatattggattcttggagaaaactgttcagtcacagatatattcttgcctagcagtgaagtgcctttattttcagcatagcaaataaatattagacctgttccaatttgatctacaatttttttctgtgtttttcaccagattgtactcctaaaacttaacaggccatcacaagcaattgtcttttgtttacaagattgatttaatatgagaggatacaaaatgtcatcgttatcctctcttatgaacaactgtagtcaaaataaggtggcacaatttaattgttttgtatcagaaatacactgacccaccttttattgagtcctgccacatgttaggtaccgtgctctgctgtggagacagagcagtgaccccaaggagctcacggtccctgaaggaggtgctagagaagagacttagcttctgatactgccaatttaatgtgagaacatggggtatactgcatcatttccattttcatcaataacatatgttttatgcaccttctttacctgaaacttactaagaatctaccagtaaacaaacatcctgtctttttgcaagtatgaatcacttaacctgctgatagttgaagaacactttaggagttttgtattcttgtatatagtttattttttccatgtgctagccaggtaaagattacacagttcttctggactgttaaattgtgcatggttttggaccccttctgctctactacagagagtgaagaagaaagtattaaagctcactttaccattccatatacttactaaaagcctgtgtaaacatgtcttaatgaatgttgttgaaagcaatgtaaatagttgaaaatataaatttatattacagtttaagaaaaccttatgaggcatcactagccactgttaatatctatttgtattcttataccttttcaatatatttgaacaaatatagtttctggcactatttttatactaggaaaaggagttactatgtatattatgcttagcttttaaggcattttaaataaccatgaatgttgatttcattactttcctttcctccatcacgagagtcatttcagatgactctttcatgacaaaatcactttaaaggaacacttacctccgattcctgtataaagtcatgagatggtcaaggtggttttccattgtgcaaattcttcacctgtcagtggtttcctcattttgccatgctttgtaaaaataaaaagaatgatcaagtaggtatgaatactgtgtgattattaggggactctgaattttaagggaggggaattaataggggagtttggattttaggcagagagaatgggcccaatactttgagagactttaatcaagctaacctgtgatcctattagccgaagaaaagtaatcctttccttagcctagactcttctcaataatagtcttccttttattaatactctttgttgccaatttgggggcaatgttttccatctccttctcacttcaagtcaataatgactctttggagggtgattattaccagcctgatgctccatgaggagctgaggcttggagctgaatacttggccaaatggcatgagctggatttgagcccagatctgtctagttgcaaagcaaggggtctattccttagttctctttttgaatttaaatttataaaggtctcaaatccactcttacaagccaaatgggctatctggaagcattagagacaggaattccctcacccagcaggtttggtttgtctgagtttttacagttaacatttcttaatttagttcatctggtaatagctaagaaaatgccttcacagactcccacaccactgtatctcagtgcttctagtctagaggtgtgaaattatgagtaaatgcagaatttctgatttcattattttgccattagacaagccttcttcatgtggggcagaatatctaggttatgtctaattcataaagctaaaggaagaagtaaagtataagctcatgtagaacaatattttagattctctgaccactagagagtgccagagttttagttatatttaaagaagtaatcttccttcctgaccataaagaactaataaaactgtgtgtttttttttaagatttttagtggctaaataaaaataaatggaaaaaaatcaatagagaaaataaaaggtaggggggaaaattgtttaagacttgcttattaccttttgtacagtgatcacgtcctcaagattttctccaaacaaacaaaagttatcatttgaagtctctgatactcaatattccatttgggtagacatctacccttcctatggaaaagggacacatttgacaactcttgaacctgctttgttgctcttagttctgtagcattcttagcaaacagggattcttacatttgatatatggaaatgtcagcctatgattttctattcttaaggcacataacattaaattagaagaaatacttaaaacttgaagaaaatattcttcacagttttaagctgtattcagattatagctcagaaaaacatgtttccagttcacaaaccatttgttcaaaataaaacccacaagttacaaatagaataaaaatcatgattattttaatcaaaagaaatctgactgactagcatatgtgatttctcttcctggctttcctcattttaagtatgtgtgtttgtgtgcatgtgcacacacctgtgcaaaggtgtgtttatggtggacaaagggattttaggcagtagccacaggaactgagttggttctttcagttatctaacggcaatcccaattttaggattcctcttcctaaactggaatctcagggacaagcttgcatagctaaagaaaaaaacactgaacatgaactataataacagggtttgggtttttttgttttgttttgagacagggtctcactctgttgcccaggcaggggtacagtgatgctttctcagctcactgcaacctatgtctcctgggctcaagtgatcttcccaccttagtctcccaagtagctgggatcacaggcccatgccaccacacccattttttgtagagacagcatctcgaactcctaggctcaagccatccacccacctcggcctcccaaagtgctgaaattacaggcattggccaccatgccaaccttcataatagtttctaactttaatatacctgatactaactacctgcaaagctatttttcacatttccacttcatatcatttttgtcttacccaataggagtgttttaaggctttatatgacaccaatcagcatgtaactgtaagaagcaaacttccccctttaccacccagctctgaaagtcaggaattctctggtctcactgatctgccatgaaacgtggtcatcaacaactctacctcagctacaactgctctctatctgtctctctttctctctctctctccagaaaagcctacagaaatagctactaaagttgctctactgagcctatgagaataagtaagttggctgggtatggtggctcacgcctttagtccaaactactccggaggctgaggcagaagggttgcttgagcccaggggttgaaggttacagtgagctaagatcaagccactgcagtctagcctaggtgatagagtgggacgtttatcgctaaaaaataaaataattttaaataaaggacaaataagtagatccagcgatcccactactgggtatttatccaaaagaaataaaataatgtcagagagatacctgcattcccatgtttattgcagctattaacaatagccaagatacggaatcaccctaattgtccatcaaaggatgaatgaataaggaaaatgtggtatatatacacaatggaatactattcagccattcagaagaatgaaatcctgtcatttgtggcaacataaatgaacctgaagacattatgttaagtgaaataagccaggcacaaaaagacaaataccacgtaatctcattaatttgtggaatttttaaaaaccgatctcatagaagtacactgtagatggttaccaaaggctggggttggggggtcgggaaggggaagagattggtcaacagatacaaaattacagatacatgggaggaataagttctggtgttctagtgcacagtaaggtgactatagttaacaatattgtactttatatttccaaataactagaagagaggattttgaatgttctcactgcaaagaaatgataaatgtttgagatgatggattagacaattaccctgatttgatcattatgctatatatatatatatataatatatatatggaaatatcacactgtatcccataaatgtgtgcaattgctaggtgtcaattgctaggtgtcaattaaaaataaaacctatagaaaagaatcagtaaatcagtaacactccttggaagatgaggagaggactgtaactttgttttctggagcctctgctgctctttttctactctggctccatcctcgagaaacattcagttctccccggccccacctgaattacacagccttcctgaactaccagcatctctctgcattctttcttgtactttgaagggactcaacaaatacctatggagtaaaagaatagattcccattgtttcttacctgacataaaattgagttttttataatgaagaaggtaattttagtgaagggcaatagaaaaatcaatatagcatttttaaaagaatcctcagttgaacaagagctgaaatgtaatatgaaaaaactgactgaataataaaaaagtttttagaaaaatatatttctgtttctactgtgaaaaacatgttagttgccaggctttcattaataaattgacaaccagtgtgaagttactcccagtgggagcttttattgctagacaccaacgaaaattcataaaggcggaaggctaaaaatctatggaaacaaacaacttcaagccaagaggcaggattaaaaaaaataataataagcaaacatgtcaacagaagac

SEQ ID NO: 95743 - DNA, 51020 bp, Homo sapiens
cttccctagcatggggctagacacagcctcagaagcagggagaggaagcatgccacacactctggaagaccgctcagggtggggcacatggagacagcaaggagagggtgtgccctctcagacagtactgggaaccttgattttctgacaaagctctgctatggactctaagccccatgaggacaggaactgtgtctgtcttgtttactgtgggatccctggcgctcagcacagctcccgagacaaagctgatgctcagtaaataactgactgggcagaggccaaagtccaaggccagtttcacaatttctacttttttggtaaactcttcaccatccccacctccatcctccccgctcccatatacacacttaagagcaggaaaaaacatacaaagtagcacaaacagtcatcagaacagatttcttgaacattgtttacaattggtggatgccttctcagtatgaactttaatgtgtggcagctttgggaactgaagtaagatacatcaggatctctggtccaacctagaaaaaaagcatgtgaggaagttccaaggggctgctggtcacacagccagaccccggggccaggttgggccaggaaagcagcaatttctcatggctggggcagtgtcagccctcccttttgaggaaacacatccacatgtcaacaagtactcaaaaccagcaatgacaatcctttcctgcagcagacgggtttctgcttattcctgtcattccgggaagcggagcgaagagagaattccaaattctcaacaatagctcctttgccctccatggttagcctggacccacatcttagtaccttacatttgcacaatatttgcaacttgttcaaagcttttgcatatttatgatcttactggattaggtcattacaagccccagatggagagctatcaacctgtcttgcatgaggaagaggaggtcaaaaaaggtccaggatgccagtggccaagttagtagcagagtgaagatttgagcccacatctctgcccagttttcctgcttcctcacaccatgcagcctcgccatgagtcagctatcacgagttccagacacaggacctcagatcctctagggccaaaaggtgcctccttatcctggtccttgtttacagtcattataactgcccccactacttacatttttgctccctttctctggcaggagctggtgctgtgacccatcttcgcctgttttgcttgaaagccatccccacacccactccgaaaccacctccctccattccattatattgcactagttggaaacaattcaaataccgaacaataggaaaacagttaagcaaactcataaagcaatatgacagaaagcttggaaaacatggacaataataacaagtatgtcaatgctctccgttcgggtcatgtgtttttgaaatattgtaatttgatcaaagcagaatacaaaaggacatgaacctaccaatcacaggtatgtaaaaatgagtttctgcaaattgctaagaactaggagtgaacttaacaagatgaaaagaaatttttaaaaaatcttcatggatttttctttcctataatgttcaaaatgataataaagagtaagtgatcctaataaatatgacaataataagcagagggggagacagagaaggaggaatgttttcccactggaactggagaaggggaaggagaaaaggctgagggtagggagggagggagctcggtgggaagtaggagccaggaagcctgaggaccagcacccacagccacagaggtgcaaccgggagcccaccctctgggggtccctaagggccagcgaggtaggtgaccaatctgaagtggtgctccagggcacctttcacaataattacaatgtcagtggtgcctcctagagctgtgcaaggtagcagttctgggacagaaagaagcctggagctggagggtttgcccatgctggagagctagagacagagccactgccctcttcaccttcttccgaacttccattgtcacccaagatctctgcagtttttctgcactttcattccagagggctaacataacacctggccgacaggaggtgaaaggccttcaggaggagcacagcctccccctggtggggagcctgactggcagggagcgggcagttccaaaaggtgccaacctgggctcccctgagactcagggacagtgccctccacagacatatcaaactcaacatgtcccaagctgactcctctcagcagcccccctccacccctctagccacacttgcttctcctcctgtgctccccagcatggcagacatcaccaccacccacccagggcttaacacgccctgcaggatctggccctggcttcagcgctcacttcaccctgctttgcaccctgtgccccacccacatggggatatttacagttcccgtaatatgccaagctgtttccatcaccatgcctattctcaggctgtttcttcagcctggagaatcttccctcccttgcccagctgcttatctgtcaagactcagctctggcagcatctccctctgtgtcatccctttgccctccactgcaccccacccccatcacctgtccccacgtagagatcagcacctcagcttatttatctctgtagtcccgactgacatctagccctgctgctggcacttcttcggcactcaatatatattttataaataaaagaacaaatgactgaatgtagaacatcaatttgggggtggacaaacagtgaatctgattaacaagaccaagcccacgtgtggtagcccaatgccactacatttctggtgacagcatctcccaattcaccactgcccttaggccactcctttctagcaagggtcttcgctccaggcccttggagacttcccaccaccacacacagcaggtgcatctgtctttgggtccctgttcttctccaattgccccgtggggggtctctcacctgtgtgtggatgcgctgttcagggcagtgagcttgccagtagaggtgctgagtcaggtgggtgggtaggctgaagacaagtcatctcttggcattcatgagaagcaatcgccttagctgtgccatgtgaggctatcttaggatgggttttgggggtgggagacaggatgcaatgattctcacggatgttatgttgtcacactccctggctgggtgagctctttgctctccagcacacacgtgatggaagggatggcagccacccatgccccctgcagtggctggtttccaagaatgtcccgggcccctggcctcacttgaaccacataggcctaatgctttccaccagggtagggggtgctgcccttcccctttccagtctgagtccccgaactctcctacatcagctcatcaacctcccctcaggccagccactcaggtgagtggagtctgacctgctgatctccttcttagcccagactgctaaggtactgcatgctctaggcctggccctgtctgtcatcctctgtagcagcagcaatagcagacaacactgtgagcctggtgctagggcagacctggtccaggaggagtaaagactgaacttcaatctccaggaagctcacagtctggatgcttaaatgcacagcagaactgggggactgagagacaacatgtttagacaaagtgagttctaaaaatcaaatccaaaagacagatacactgatgcttctctttaaaaaaaaaaaaaaaaaaaaaaaaaagatcttcttaagtcacacatttttctactatagggacttgagatttcatccctggttccaatgggttctgcctcgagtctttgggcaggcatctctgatccctgggctctgccaacagtttgggcaaacccacaaggatgaaagccactgtgagccttatgttcagagagtccttagtgcaccaggtgtggttcctgacccctagctgaaagatgtcagtctggcaccctcatggatgaacctggtattctggtctccatctctgttcccgttctgctacagtgatgcccctgacagggaagtgtgagtgctcaaaaaagtgagcagatgaaagaatacaaacagttcaagaccaaggtctgcagatgtgcaaagggtgcattcttccaggcacttctacagcccttttcaaacagacagtctcatgaggctaggtggctggaacacaggattccctgactaagacttttagggccctagaggtgaatatttcacactctccccagccctgaacacaaatcagtggggaaaatgccatttcaaaccraaacttccttcttgaaagggtatgccctgttaaaaacctgggaggtttctggatgttaaaaggtggtcctggccaggcgcggtggctcacgcctgtaatcccagcactttgggaggccgaggcaggtggatcacgaggtcaggatccgagaccagcctggccaagatggtgaaaccccgtctctactaaaaatacaaaaattagccgggcacggtggcgcacgcctatagtcccagctactcactcaggaggctgaggcaggagaatcacttgaacccggcaggcggaggttgcagtgagctgagagcactccagcttgggcaacagagcgagacgtcatctcaaaaaaaaaaaaaaggtggtcctggggaggaatttagggaaagggcactgggaagactggaattgctcagcacagcagaggagaatctggcttcccagagtctatcaaggaaggaaggatgaggtgcagagatgggaagggaggaacaggaggaagctagattagatggcaatgggctagggagcgtggtgggatcttgtggccattgagaaatccccgggtggtaagacagccaaaataacttttcagaacatttcagaaatgtgttcttaaattgtttgctgtgtgatgtaatctctcccctgtgacccacaaacctttattaaaagttttactacatgttacagccttattttgtagttgtttagcatggggtgggggttgaaaggagaagcggctgaattgaccccaggagctacagaaacagtcacaagaccagaatagtgaataaaatgccagacaaggcaaaaaaactagagccagaggtgaccatgaaaatccaagtcctcccagtaatggactttccacaggacatggtaattggagccaatgtcatttgaatctcaaaggacaagctacctcagctgacattaggatacaagcaggttttgcctctccagctgaactaagccttgcaaaacataaaatgcgtcacatgtccttttgccagcagggcctcagcacaggcactgcacatagtaggcccagtaaaagggtgtgagcagtccatgaatgtcctggatgcccactgagagctggaagggtctaatgctttggtggagcaaggaccggaaggccattctggctggggacttctccatcagctctcctggtctccaccctcatacccatcagccctatcccaatgagggttttgtaaacaggcaaggcccagtcggagatggtggtggaggaagtcacaaagcgttgtgcagaaaccagactactctgagtcagttctgccccctatgaagtcaaaaagacaggcacggccccttgggaaggagctttaatccaaagggcctggggctgggccagtgagtgagtgggctgtctcgagccccggacatttcctaggaatcgctgtaggatgtgtcgtgtggggctctggtctttgctcccaaacacccctttcatgcgcctctgaggccttgccaggaaccccgcagcccaaagaccctccgttccgcagcatcgttgcatgaacctcgcgctgctcccagggctgatggtgccacctggtggcacaaagggtcctgctcaccctgggaacttcgctctcgagcgggagaggaacggcttctgtggcccagcccagcgtggtgacgtcacgacagagtgccctttctccccgcctcttccccctcccgggagctgccagtacttgacgtggcgtcaccgccctctaccctcgctttgcgtgcgtgtttgcgtacagcggaggtggcggcgcgggcaggtcggagctcggagctgctgttctggttctcttgtggccgccgtcgctgtccggctgccttgggctgccgaacagacaaggcgtgggccacagcacctcagaagccgacgcagctcgacgcaggggccggcaggagggtgggcgatcgcgtgtcggagggcgccgcgcgggcaggcgggcgggcgccagagggggaaagaggcgggggcggcgggtcagccgctggccgggccggccggggaatgtcgatgcctgacgcgatgccgctgcccggggtcggggaggagctgaagcaggccaaggagatcgaggacgccgagaagtactccttcatggccaccgtcaccaaggcgcccaagaaggtgcgggggctctgggtggcggcgggggctcgggctccggcctcgcggaagggacgcgagcaagcccgggctctggctagtttgggacttctgggggtgactggggacggcggaggtgatgtagggggtggcggctgtgcggccccaggcctctcccgggctgaaaggccgcctctgacctcgctttcctttgtccctcggcccaagtcctccgggatcgttttgaaacccgacagggccaggccttaaatttgcgactgacttttcctggatgaagggcctcgaagacgagagtgggagggggtgaaccaactcagctgacccttgtgaccagtccgggggcatggggtgtacagaaaatctcccttcaggtgagtgggtaaatctggcagaacttccatcaaatctttgggagcagtggccgctttatccaacaactgcgtgatagctgggaggcaagagaaaagaatgcgtgaagctagctctgatatacaggtgaaagcgatgagggtaacatgaaactgaaaatctatgattttcactttctacagcattccaattacttcgaaatatgtaagaaattgacatttggaggttggtgacagcagacactgtcatggatacaggtggatcctagagtcatgtgaatagatcacttaggcatccctggagaaaggagcttgggtgggttggagtagtgggtggtaagggaagattgctcactcttgactgtacttttgaggcagaacaagtttgatctattgtgctgtaggttgactcaaaggacacccttcgaattctctcataaatggcaacctttggagattttagtctgactagctctccgagtggtggaattgggatccttattgctttctcatcatttactgccaaccacatcttgattttccatacacctggcacccagttagcagtagaccagagaacctttacaaagaggtgaccttcctgaagccagtgagaacccagataaatgtctcccttctttataaagacagagtcttacaaagctgtctctgcctgcatccagtgtttaatgggatgcagggctgaacaaagcaagggctgcaggaatagttaagtccttgaggcttcaactagttaagctgtcttaagtgggagagatggctcttttttttttttttaagtgaattaacctgccactccagaaatcaaatgcaagatcaaaaaagacgagtcgccattgtgtgctttcgctgttttctcacaaaattaaraatttaattcctttaaaagattgkggaagattccttgactctgaggcatctgattaactttagtgctgaragttcagttgactgctttgttgggacaatgaccctttgcaatctgcactattctttggagaaacagtcacagtccttataagcagaatgattgagggtgggaccttagatgagttagaggaaagaatgggaaagccctaatacctgaatttcccagactctgtcttctttgctgttacttgcctttatgttagtaaatctgtattcttgaaagtaccactgttgataagacaaagtctatatcgtagattgtaaaaactcattaaggcagggattcttgttcacctttgtatccagtgtgcctagctttgtacccagcatacagtaggtactcaaatattaattgctcacctggctaactrgtaactgagatgtccatgtggccacctaccatgaataactatcccttttcctctcttcttcccaggaggaatattactaatgtgtattattgtcaggccaagtgctgatgattttagacttatattgcattagctaaaagaagcaggctctgccaggaatgtgggaagaccctgttttaagtttccatttaccagtaaatgtgccccaccgtgtttcttattaatctttctcttctaagttttattctttagcatttacgtagtactttgtaataaagtgtttcatgatgactaattaccctttccctagtgatgataaaagacatttattaagttaatggatcagttgaggactagtcaaggtcacatagcaagtcctaggcaatctgtttttcagaactgctgaattgaacattaagacttaagtcacttttgtacctctgccatgtgttgataacgtgaaagcatgggaaaagtaagagggaaaaaagtaacttggcatggtacttaatggtgtgagaaaaagacctcttcaaatggtgcagtccttcacctatgagaattctaccctggctctagaccagtaatccttggattattctgaagccctgaggcccctcaggaattgaggatgttcttgatgccagaggatataggttacttcagggtgaccttgatggtcctcagttagatcagatcccagtgtcactttctggtcagcttttattcattttgtttgctttgtttgagacagagtcagcttttattcattttgtttgctttgtttgagatagagtggatgtccatcaattaaaagcataaatatctagattcttcagctataatcatgacttactcagttttgtatgccaaggtctatcacactgctatgaacaaaataggacttgttggtttgattgaagatttgagatgtctgggtgtcgagaagtcaactaaagggatatgaccttgagcaaattaattagcttttgtacctgcatctcctcatctgccaaataagtgcctattttttttggaacaggtggagataggggcatgttggggagttaagatagcagtgtaattttttaaaagtctattcgtatatttatattctttcttcaatgggcatttgaagtggcttataacacagaacatatatgtgatataaaaggaagtaaaaactatagaaagaatgaaaaaaatattgttaacctcgagggctaagatagttgatgaggttgatcacatgcaacttgaaacttttagcagccagaggatgaaaagaatcatagttacagtctccttagcaggcatgggaaataatacatgtcaattcctcaaggggacgacttttcctgacacagagttctaaaataatttttcacgggaatgtcttaatagctgtagtgtaattcacattgtaaggcttgttcacgactgtcactggtgatttcagatggtatggctaggaaaatttgaggtaagaaaaggaatccttgagttttaasagttaagtgtaccacaactgaagaagatccttgtttaatgttggcagttatcggtcaaaccaagtaagtaatctagttccccataaccactggttatttatccctcttttgctgctactttgtgtaacaggagtggtaactgtccttggacctttggaaattgacactgtgtcaagttgattcttttttcatagtgtaaacccaaatctccaacttgttggagagctcttacaataagcatgtttctccggaaggcctttcagaacatttgctgttctctgaacttctgaacattaaaggcactctccagagtgatccattaaacattttgacctaggatctgtggagtcagacccatcagcaaaatgtggggaaggagaagagcacagaagaaactacttttgtttataggatattctttatttgaatgaagctatgtgccactaattcatcaaaagggtcagctgagacttaggaagcacaccaagtagagccccaatgggtacagcttgggtgttaacccgataggtaaaatccaggtttctccttttgtcatcagagttatcttacggttaatttttggtgcagttgtatagaatttacgccaggacttgtcagaatcactgaaaggagatttcataggttggcatttcctatcttcacatcattagtatctcttgattctccttaragtggctgctgttgtagtagcagtctttaaaacaggagttggggtgtaagaagatcctctttttaagatttctccgcaggtattgattacatctctttttcttgtttggtttagttagttacactctagtttccaaattactttgttccaagtttctttagacatttagcttgtaacagaaatctgttagaagatttctagatcagtagttgtctagatcttttgctgccaaggttacaaatgtataccttttcttttatcaggagtgtgtcatttggatccagagtgttttacccaatataatattcttttttaaaatttatttttattttttatagagatggggaaatccctgtgttgcccaggcttgtcttgaactcctgggctcaagcgatcttcccacctcagcctcccgaagtgctgggattacaggcaagagccaccacgcccaccccaatatagtattcttggaaagttgtctataaaggatattttgatacatggaatcatgcaggtctttagttgcctgtgactcctagcaagtgtactctgccactccgagtagttaatgatctgtaaataagcactttaatgccctcttggggttgttttaaaggaactggcgaataaaggagaatcatttatacgtacctgtttctcaagtttgggaatgtgagtattgcatttttataaagaatgtcaaccctgattatactggatacattttattataatttagaactgaatagtaattcaraacacatgctaatgaggtgcgtcagaagcattcctgtcatgtgaagggcaacctacgtgcatagaccaraattttttctagcctgaaatctgagaatccccagttgaagacaaattcttaccacaaattttccttttgattattgtcaatactatcagtgcctattgtgtagtaagcagttaataaaaattcacacagaattgcagttgcctttccttttctgattccatattttcctttgactcactcaagtagttcttttgtcccactgttgcttggctgttacataagacgcctttaacttcccgtttctgttcctaaaactgtgagtagtagtacaacataaggtaagcactgatttttggagtcagttttacctttagtctctaccatctaatagttgtgggacattcaacaagtgacgtccttttctcatctgtaaaatggggaacaatgatagtgctatctatatacatggttgagagggttagcatttagtaaatagtaattagtggggtttttttgtacctagagtgaccatatatcctggtttgcctggcgcaattctggtttatacctgttatcctagcatgcagtccaaggagtgcctccgtagctctgaaagttaccctggtttatgtggccaccctatttataactctctggatgatgcaacatgatagtgcaaatgagagcctaattttgaaatgttaaagagccaaaacaaagaagtttctattggaatgtcttttcaataagaaaatttttttctgacaaaaatgttattttatatagagcttacagctactgaaccccaaaacattttgttaactacaggggtggggtgtgtagacagagatcttagagcttttgatggagttgagatgtcctctaccttaccattccccattcatcccccgtaatacataatgcactcatagaatgtgggtatttgtcagacactgggccagtctcagtccaggagtttatttccttaaacttcaggtgtttggggttttcccaaactagaatccttgaattacatgaaataattgcaaagacttctgaactgtgactttatcattttaggtatgtactccagcacccccgcccccatccctgcaggtactgttttctcattgctcttaacagcctgcttctaattatgtataactgattttctcctgtagaaatgtgtggcctttgctgcatgccactcatagaactagagtggagcatccatgcctttgttgagagactcagactgctttcatttttgtttctatctctgtttaatttttctaaaggatttagcctggtgccttaatctcagaatgtagataatgatggatactgcttatcagtatacattggggggcttaatcattcactacccaaatggaacacaaagtaaaaagtttaatgaactattggtaaaaggtagtatttggaaatctggggtagagattggaaaagtacttttgagaaccacaggtacaagactctccaagcatgctcctgcttcttaccataaaagccccaacgcctccgctgatgtgcctgtgtacttaacctgtggggcttaatgggcttaacatgttcttctctaccagcccaagccagttcacttgttttaaagtggacagcctgtactcagttgtgtgatggaaatggggcatattaaacaggaggggtctgggactgctctctgttccatgctgttcatcttggacctgcctcaggcttacttcttcacaatttgaggaactgctcagcaagagcacaccctattgttgacatgtttttcttttctctccggaacctgcgagtgtacgatggcattagtggaatccctctgagcctgtgtgccaaggaaaatgctaatgtgctgatccacaatgatgtgtggctcagtgtgaactacgtagtaaatttgtgagtgacagagtaaaggggcaagaggctggaggagatgagtataaccatctttcattcacttagacttcctgaatgaagccrttcatactgagttttgagcaatgagaggattttggaagttctgtttttaataaatggctccaactcttctagtacttactaattgtattaaggtgaacctttgggacataggtttccatatgcttaatgggaaatactttgtcccttttcccccaagactggcttgacctcacgtcaagacctcacgtcaaagcttttgggccatgacctgtttcctttgtggttccagaaatctgggggcggggggaagaaaagagagagacctaccataaaagttaataggacaggctgggcccagtggctcacgcctgtaatcccagcactttgggaggccgaggcaggaggatcacaaggtcaggagatcgagaccatcatggccaacatggtgaaaccccatctctactaaaaacmcaaaaaaaattagctgggtgtggcagcacacacctgtagtmccagctacccgggaggctgaggcaggagaatcgcttgaacccaggaggtggaggttgcagtgagccaagatcgcaccactgtactccagcctggcaacagagcaagactccgtctcaaaaaaaaaaaaaaaaaaaaaagttaaaggacagagattctgatctgccctctttgaccagacccaccccttctcctttctcaaagactttaaggagaagacttcaggttctcatgactgttagctttattttggggatgtagaaaatagagattcactttgaattttcaaaatgcacatccccatctttgtttctaattttagaagagaggtcagtaagtagacagatttgtgtagaagatagagaattggaatatgcttctcttttgcctatttgagggaatgctcttgagaatcactggattagagactgtagaacaatggttcttactctttgagtcagaggtccttttaagagtttaatgaaaatcctggttctttcctcaggaaaattcaggagcacaaaaatatgcgtattctgttagaggatttatgggacttctgaaactcatggatcctgggttttaaagtcctgatgtggaaggccaggcctccaagccacagcatctcttttcattacaagtccacaaactgctaagagatttaagtttccagcctgcagtttgtccttatggcttggaacaaagctgaggttgttggcattgtcagctccctctttgggatgctcctcagcttcccaaaagactcattataagtgccttgagagttcagctcaggaacttaacacacattcgaaccggcatttcggccactttgggggaatttttggtattatctcaactctactgctcttcatatgaaatgcagatgcccctgaagctccagagctgattccgtaggagtgtttgaaatagtagctcacatagtagattatcaaaactaaacaaaataatttgcttctgtatgtctctcaaaaataggttggatttcaatgtagtacttctcaaactattatattttaaggactgacctgatatttgaattttactcatcatttgacttttctagatggaatatgttgagggcaaagaccgtatctcacacatatttatatagtacctggcacataatactgtcaataaatgcttattgaataaaataatgtgagataatcattccttggagaaagtaagttggacttatgtggtggctttgactcactttccctttcagttggctggggtgatttttctaacttagagccctctcacrtaggtataaggaagtaccaagaactgcaggtgagaaattgatgagaatttccaacttaatagatccctttataaagccagaaataggaggtcagggagaagacatctgaatatatgcctccagcttcttagcccagtggcagtgggcatagggatatccttagacaataatggggaaggtaacttgaatttctcaccattgaaacaacttttaaacccttagcattagggagactctgtccaaagttgaaactggtatcctggtttatacatgctcttgatttaaagaacagggaggctttcacatagggtatttgaggtttggggattagcgatgagttgaatagtttgattttggaaagtacattggaactctgaaagtaataaacaacagctccgtccggcagtgatgagcaaacttctggttcttactctgcaaccctggctgccccttctgagtcaaaggctgagtttgatgctcaaaagctatacatgcccttctctctttgaaacacaccttctttagaattacagtcttctgggaactgggccaatgcttatcctagccagaagctcaggctctagttggcactacattttgtgtgttctgtttcacttcaagtgtataacttaggcaagattcaggggaaaaggagaccttcagaattttgctattttgtgttgtttgtttgtttgtttgagatggatttttgctcttgtcgcccaggctggagtgtgatggcacgatctcggctcactgcaatctccacctcccgggttcaaacagttctcctgcctcagcctcccaagtagctgggattacaggcatgtgccaccacacctggctaaattttttttggtgttttttttgtttttgtttttgtttttagtagagatgggatttcatcatgttggttagggtggtctcgaactcctgacctcaggtgatccacccgccatggcctcccaaagtgttgggattacaggcatgagccactgcacccggcaaattttgctattttggaagttgaaataggtgcttcctagagatagcagatgtatccagttgctttggtaactaattcagtttcttatgggtggccaggtggtatcccacttattattcaatacttgagggttcagtgcccagcttctgagcaccagctttcttagcaagcaagacatgaagattcccagtgttcatttatgagaagtagcccagctggcttgtcatgctggactagatgaattgtgaatgttaattatattgataatacagtggccttggtaacagacttgtagctgctgtagaatctgtttacttcaggtttgtaacagaaaagagaccaagctggttgggaacatggtgttctcagtgtaataagatgtattgtaagtccaaggaaaatgcatcttggtggggctgaccttattgcaccccttccccaagatttcccggagagaaacattattctggggatagtttctgttcttgtttgccaatcaataatgaattgaggttggcaaaggctgggtttttagtggaagtggggtaaagcatgtttacaaatcataaagtttagaaggagaacacctgtgttaagcaccttatttctctacctagtttataattaggaggggatggttgatgagattagtttyggcccttgcattcaggaggtggagcccctcctatttggggagcagggggttcataattctgtacattcttttcttactccgcagcgaggggattagctgagcactgggcatgtctggaatgagagcactttgccaatttttactgaatttggaccaaactaataaaaatacaatctcggtcttcctcagacagtctctttgtcatgttctcctaacccctaggatccatctgatggattgtctgttcctaacagatggagttggcattaaaggtagattctctacttcctttgccttattgttttatttctgaacaaggcatatctaatgcatttgttccctgtattggaagttgctttatcaagagcctagtaaactcagtgtacttgtgtttccttttcagatcctgcttagattatttcttagatcagcacttctcattctgtggaaggagaagaaggtatcagtcacatagagggttttttcgcaataactcattacctggctctaaactagagctgtgtaatcagaatgggggaggagctgagagtaagagaacagatggagaatgggttggcattttgaaacagcttcaccagataaacttgaaatctcccagatttagaaccattcttttagattatctagcaagactggccaacattgttcggaaatctaacattgagatggtaatggcccaggcacggtggctcacgcctgtaatcccaacactttgggaggccaaggcaggcagatcacctcaggtcaggagttcgagaccagcctggccaacatctctactaaaaatacaaaaattagccgggtgtggtagcaggtgcctgtagtcccagctacacagaaggctgaggcaggaaaatcgcttgaacccatggggcggagcaggttgcagtgagccgagatggcatgactacactccagcctgggcaacagagcaagactatgtctcaaaaaagaaaaaaagatggtaatgcagctaccaactctcctggatgattttgatcacgaggagaaatcttggtcctccctcatgtgaaaggtcctgaaaatagtctaccgttgctctttttctcaatgtattcagagtaaaccatgaccaggaatcatgtagccccatctgctcagggtgcagcgtcccagggcctgtgctaggcacttagggtgcatcagtgaacaaaacaaagattcatactctgtagagctgacattcttgtgaggttattatttggatcatttaagtccagtgaagtggttcttaaccattgggggtttggaaccctctgagagatgtgtacgtattccagcaaaatgcacacagtcatgtgtcacttaacaagggggatacattctgtaaactgtgcccttaggcaattttgttgttgtgcaaacgtcagagagactttaaatgactggcaacgcagtaggtttgttacaccagcatcaccacaaacatgtgagtaatgcactgcactacgatgtcaccaggcgataggaatttttcagctctatcatattcttatggaaccaccactgtatatgtggtccatcattgaccaaccttcattacacagcacaggaccttgtaagggggaattggcagcctgcaacccatccatggacccagggctaagaacctagaagacttgtctagatttgaggatgtggtgattgggataaagccaggccctgaattgggtgtttggaaccattatctcctcgccagactgggttgtagtttcttgatctgtacagccaaagcagtatgtaaacaactcaaggatatcactagaaaaagagggaatggctaagccttctctaagctaaagagtctatgttttatgtgaaatgctaagaatgattctgactctgttctccctcttaccctagtttctagttggctgggcttctggtgctcaatagattaaaagtcaagtcagaataagaatttccctaatgtgctaatttatgttatgaattcctagactgagagtgatagtaaagttataaagatcatgaggacattttagtgaaattctggcttcaaaaacacagaaagtgacaggagttgaagggctgttgaaatagccagagtagagattagagaaagatgacaggaagaaaaggagggcagaactcagacagtcaactaagctggtgagccagtagccaggagagcagctttctccttaagccaaagtgagcagatctgagactcatgcagaaaaatactcctttttggtcttgaaggggtctgtcactgttgctttgttaccaaatagtacccgggataaaaagcgggacggcagataagggtttgccttaacatttataccaacgttaatatatctctgttgctggaaaagttggtgttaaacttgaaagaatggccaaaccctgcctgagggttagtgcagtgtgtaacgcgtactgcagaaacatgaatgaaatgggacactgggagagagaattatgtagaaagacacagccggatttagaggttggagcacatagagtcctgtgctagttccacctttacctccctgaaatctgatctttagtataaccacaggtcaagacctctttactttaggttgatctttacagggatatctaagggaaactttccatatgcacactggaagatagctgaataagggctgtgttcaggctaaacttgtataaactcatctcattagagaacagagcccacagtcctccccagaggagtgaggaggctctagatggttccagttataactgctctccagcatatggaaaaactgttctgctatgaaaccttccaaccagctactcacataaagacatttcattgtttgctcagtgatgcattaaagctgaggctgcctaagctagagaatataatcacataccaattatctttattttttatttttaaagaagccctttaaaataaccaaaagaatttcacacctcacttcctgggactgggactgttttgcagttgtattcagcttatgaagttatatagttaaaaattgctactaagttttcggaaaaattattcttaaaaattataattaaaaattcttattcttgggccaggtgtggtggcycttgcctgtaatgctagcactttgggaggccaaagcaggaggatcccctgagcccaggagtttgaggtcagcctgggcaacacaaggagaccctgtctctaaaaaataaaaataaaataaataaaaattattatttttttgagacggagtttcactcattcgcccaggctggagtgcagtggtgtgatctcacctcactgcaacctccgtcccctgggttcaagcaatcctcttgcctcagcctcctgagtagctgggattataggtgcctaccaccacacctggctaatttttgtatttttagtacagatgaggtttcgccatgttggccaggctggtctcgaacttctgacctcaggtgatccacccaccttggcctcccaaagtgctaggactacaggtgtgggccaccgagcctggccataaaaattcttaagtggaaaattttctccgttcattaattgagtatttgatatttttttcagctttattaaggtataattgacaagtgaaaactgtatgtatttggaccaggagtgatggctcatgcctttgggaggctgaggtgggaagattgctcaaggcgaagagttcaagactagctagggcaacatagtgaagtccccatcttttacaaaaaagaaaaaaaagattagctgggcacggtggcacatgactgttatcctagccactcaggaggctgaggctggatgattgcttgagcccagaatttggggttgcagtgagctatgatcctgccactttactttagtcttggtgacagtgagactctgtctctttaaaaaaaaaaaaagtattcaaggtgtacagtgtgatatttttatgtatacattgtgaaattattaccacagtcaagctagttaatatatccatcacctcatagttactttgtgtatatgtgtgtgtattgtatgtgatgagaatacttaggatctactcttagcagatttctagtatacaatgttattgttaactgtagttactgtgctattcactaactctccagaacttatttatcttataactccaaactgtaccctttaaccaacatttcctcatttcttccaccttcctgacgcctggtaagaaccttctgctttttgcttccatgagtttggcttttttagattgcacataaaagtgagattatttaattgattactttaaataaatatctaccataactatgaaaccaagattcagtaatcagatatcatgttacttaaatccagaatacttcaataaaaataatagccttacaagaacttttgttagttgtagtagtcagaaaggtggtaccagaaagtagaaatacatcaatggtaaaattttttttttttttaacctgaggtcttcaaatttaatacaacatttattttatttttatttttattttttggagacagggtcttgctctgttgccctggagtacactggcacagtcacagctcactgcagcctcgacctcccaggcttggtttataaatgtgagccactgcacctggccaaatataactctttttctgttggtggaattcagctgtgctagatcttttagacataagacttggaaagggtgctttttgagtggcacaccacagatgagaaaggaacctaatggaatgtttttagtttaaaagaaattatctgattgtgctaagtgttcatgtgtgaaagaaatattcctccagcaccattcagcacaggataaacctcttcaaaaagcacatttaaagtatattctctgttgcatgttttagaatatggtaacttctcatgaaataaccagcgaatttccccagtgaccaaaagaggaaaaagaaaaaatcagtggccaatttgaccatactaaactaaaaattttgcttaaacgcaggtggaaatcatacaaatagggaattctgaattaatttcttttgtcctagtaaagtagtctagattagattgcccatacattctcctccttactccatccccagaagacaatggaagtgtattctagaatggaacattttgttaccacagygtttgggctctgctattactgggctctcctcaccctttccagatctatggagcagtacttttcaatggcaatttgttggcaacgtaaaaacattacatttctttgcatcattttacttttctgaaaattaataaaggtttttggaacttaaagaattattttcctttaccagtgcttacaaatctttatctggtgttayaagctcagaaagcttatagtgcaacagtagaccactccaaggtaaactgaccccttggaaataaaggggaaagctgctgtttccccagcctattccaaaagaaggaaaatagaactgggcttatgggtgttttttgtttttgttcttttttttttttgctttttgctttttaaacctcagtgttggtagcaaattgccttaagcaagtcacttagccccaacccctgttctgttttctcatttgtgaagcatagatgcaacattgaaaggattctagaatgttttgaaaatacaaaccctctgtaaactgtaagccacaggtgttgaggcaaagcacttaaagtcatataaatctaggcattcaggatcttggtgtccaccctactagtaagtgggatttcaaacttcctgtacaatcaactttaagtaaaaatcttcatgtagtgctatcaggtggtgttaccagtgatgcttgttctttgtatgccaagagttcaacaaaaatggtttgtaaaatatttagatcagtgatattctagcagtgatatatattgacaaaatttgccaatattttgctatacaaaattaattttttttttttttgagacggagtctcgctctgttgcccaggcgggagtgcagtggcatgatctcagctcactgcaacctctgcctcccaggttcaagcgattctcctgcctcagcctcctgagtagctgggactacaggcacacgccaccatgcccggctaatttttgtaattttagtagagatgggtttcaccatattggtcaggctggtctcaaactcctgaccttaggtgatccaccctgctcgacctcccaaagtgctgggattacaggcgtgagccaccacacccggccttgacagctttttatttccctgagcctatactagttggttcttataccctatgaaccaatacaaaatgattcccaagtgaaaaaaacaaggtgcagactatattatcatgctaccttttgagtaagggagggaaaataatatgtattcgcttcccacactcctaaaaagaaacataaaaaggataaaccagaaaccagtgaaaatggggagggacacgtagagtatcagggctaggaatagcagtgaaacttctctgagtgtaccttttaaagttttgagacatgtaaatgttttatatgtcaaaatcaaagagaaaaaaggaaagctttaagttcttacaaacacaaaggaatgaacccaactaaaatataaaatcttaacctaatatatcaaattgattactcagtcacacagaaaatagtactttgattatatatctttatgaaatatattctgaggacgagaagaacttcaatgaaaccttgacacgtcactcagtaaattttggtgcgtaataacattagtcttgtcattttgaaacttttgtatgcattatagaataaacaaacattagagacaagacatacaataggaaaattaaactttttttaaaaaaggtaatactaaatctgaagtagaaatatcaatatgaactcataagtaaaaggattgatttctctctctaccaaaagaacctaggagtagtgcatctctaatagcaattatcacacctcttactccaggtattagcttctaaatactactcccttctaaaagaaaggctcctgagagaaatggttgattccaggtttggagaagaggaagaacaaggtgagcctggtatatcttcttttgtcaaaaagagtrgaaggactgtaatggaatcatgtcaaaggacagaagagccagcttgaaggaggctcccactggcccaatttgagacaatatgagtattcagtgcaattaatgtataattaagtgtaatctgttaaatacataaaaatctgaatgacaaagggagaagatttttctttacaaaagaatgccagctaatgtggaagcattgatagaaaaatagaagttgcgattctataaccttcccaatataattggttcaggcaaggattattaacagatggtgaagtcattagggaataggatattaacatgatgaaaaaagtattgccctacaaattaacttttacttgcaaaagagaaaatgtacctttcaaagaagagatctgatgttctcactttaaccaggactcaatcttagcattgctaatagtggaacaacccgacatgtgcctcctgataatgatgcaaggtgaaatatactacataatgcaggaaatattcttgccagaattttaacctttttcaaataaaacctcagaactgaacttccagtttataggaaggaaaccctctgaaaaattcaaaacatgagtgattttataagacaattagtctggattcctcaaagaaaagtcagtatcacaagggggtgggagacattggagagactgttctagattagcagaggctaaaggaacctaacaaccaactgcatttaatgaaccttgaatccatgctgggttggcagggttgaggagactgttgggatataaataaatattcttgagaaaattggggaaatttgaatataatctggacagtctggatatatgaatatatagaataattgttaatattaagtgtgatatgtcatcatggttctgtaggagaatattcttattcttagaagatacattctgaacaatttattggtaatgttcatgtttgcaacctttatttttacaggaccatgtgaaagtatgcatgtgtatgtgtatatatatagagagagaaaaaacctattatggaaaacggaaagatttattctaggtggagagtacaggtgtttattatactatgcttttgaatttttttatgtgctgaaaatgattataataaagttggaaaagtaaagtacaacaatggtgctagcgagtggggatggagggtagggggtgggagaggagactttaatgttgtcactaaagtagtgggtatgttccaggaaccaggatttcttcagtcacctgtactgatttttttttttaaacctagaattgatgataaatcaatatcgggagaaacagagatgactggcatgtgtttatataatattggtggtgggactgagaaaagaagtatggacaggtcaggcaactaggtaggtagtagatagctaaataggcattgaaacagtctgggtgtgtgttacattctgttgcaaattgtggtgttcaaaagattgggaagcccttttctgtcctacttactgccttttttctaacttcttatgtttacttctagttggcagttgcaggcctcgattactcattgactggagcactttaggagataatagtgaagtgaagtcagtgaagtgtttagtcttacaggaagagaggggagtagctcacaagggtcaaactactctttggcagagtttttcaagctgtgtgttccttaccttttaagtgactcagcagtttggggcctggtattgcctcacctcttctcgccgcgagcattgacagaagatctagttgagtcctactttgaaaggagtattgcttctgactgtggaattggattctagctgtgtgtgtgttatatcctgttactgttgagacacagaggcgggagtcggcgggggaagatatgtgctgagattagtcagcctgccctccctctcccccaagaaactcaggccccatctggggagagtgagaacttaagaaacttgagacagggaaggagagccgggagcagccaaaacctgctaagtctcagaagactggtttctgcacaagggaatggaagaagtgactggaggtggctgtggattcaactctggcctgagattgattcccttgagataagttgttttctggtgggtgtgtctgggagcattgtgttgggaagggaattcctttctttgggaaacacttttttttttacttgaagtgaaaggtattcagacttgtgtatttcttgtaccaaggagtgggtgtttattgataactgtttctttgggttcatctgaagtgggaatcagactggtaaatatcaagaaaaactgggcatggtggtgtgggcctatagtcctagctactcaggaggtgggaagattgtttgagcccagcagtttgcagccagcctggcaaacatagtgagaccctgtctctttaaaaagagagagaacgtaaggaagtaaaggtgttacacctgttttggctgtctgccatattctcttcctttcctctgaaaaaggagtgggtgagggtagaatctgtagaagaaaaaataaattaaccagaaaatatgtgtgaaaragggattagaaaagatgtaggaatcttgaaaagtgttctgacacactatgcttagtaatgatgatcttgttaaaatatctagttttttattgttactttttttttgctcagttgctaagaaatatgctgaccataatttctaaacagaaaaatctctgcacacaatatgctaggacagacaatgggacagaatatataaatttaggaatgtcccagagaatcagtagtgtaccaaaagagggatcctagcccttcaaataattctctgcagtaagaaagactgctctgctcacttctacattacactttcttaatgatttgttttcctagtaattgttgtttatctttgaatctagttcttgacacttaggaagaaacctttttgaggaaattaaaagctgttagattggtatttgaaataacgaatttgacaagatgtctaagttaaacctaagttaaacaatatccagataaggctgtgaagactataatatctggcatgttcctcatggagcagtgaaattccatgccaaagccacttacattactatactgtgggtcaaaacatgtctacagattttaagggaccgtgtttccttgcatagaactttcctggagtagcactggatacttagttggtgcctagcaaatgtgatgactaaagaatataatgcatcacagatattatcctgatcaccatttcttggctaaaatgttgtagtggaattctggtggctgttaattctttctcattcaggagatagcaggcaaaattgggtgggccctgggaaggagtgtagctgggctatttaacatctgagaatataggatgtgtgtttatgaaagtaaactcagcttctaatggtaaaaaaaaaaaaaatcaattaggatcaactaaaggaatagcatacaatttttcttctcttgaggtatgtaacttttttggattgtctctgatccccttctcttggtaaggtctgcacaattctttcagctcactttgtcagcagacttcccactaggtagtgcatataccccaaattattcgtttggtagagcttttctttaccattctcagtatcacatggaagaaagtcaaccattgtacctgctaagctatttgaagaggtgctttaaatagcatgttaaactggcctgatatttaattgggtttttaagacacagcaagtagacttctgtatttgggtgtgctatttgaagaatgggtcaatctgaccttctagcctttcataaatatgctcttagtgtaagaatggaacactggtatgcttgttcagttgtgggtaaggctgtttatggggtggtgagttactcaagcataacatcattctttaacataagactttttacttaaagatactttctgcatttcagccactttatttcctttccattccttctcttcccaatcctactttttacttaggtgtagtattccttgtagatgtagatttgaagaaaggtgaaagcacagtaattaagacttaatgtttggaagaaattatgatgataggaattaatagaaacagaacaactttgtagtcttccttttcgtcttacccagattatcatatttgccttaaatgagtgagtccaacccaatcagaaggctgttgttgagatctggagagaaaacttgtgatatccaaaagttgcttttggcagcagtgtttatattttcaacgtgagggtgaacaatgctccaggagatacttcaccaagagaaaacagagctactagctgtgaagataatcagtggagctagcaggtctggaggaaactggcagagcagatgtattccacagcatcagttgtaacacacattctcttcaggctgtaatttggggtggaagaaaagaccaggttttcatgcatctttgtattgctgggacaccttataagtggtgagaatgtcaaacagctgcaagaatacacagtccattcatccttgccatggcttgggttaactacattctacccacttcaaatatggaccatattcattatttgagagatggggaggtaggggcactgcactggttagtaagctgctaagctgcttgcaacacagtccagtatttttagatgggaaagattttgcttaggtttaggctactgatgarctttattaatataaggggaaattatgactattcggtttttaagttgctgaaraaacacatttctctcttgccacagccacctttctatatgaaaaactgcaagtgttattgcagttccctcccccaccctcaccctccatgtacctggtatctgggaacatgcccagaaccctttgaaaaaaggcgaacaggggaaggaatcatagcagaggggagagtagcttccaaatagaataggctgcatatgccagcagcagggaggctggtggaggaagggctgcctctggagagtgttaagaggggttgatggtctcttgactgtgtatttttttccatcatcaaaataacagcatattgagttggaagtcattaccttggtcctggattaatttcttcagcaaaactagctttactgactgtagaaatcagtttccaatttgtttatattagctgcttgtgcctaggctgcccgcttaaacctgattgctgcactgcaatctggtgctcccctagctgaagggtacatgtgaaagaggaggagaagcttttgcagctgtaactaatgggtagtttactgttcctggctttaaagtggctgtaaccatgttgccagtattatacagagaagattttaatctgtagtcatttacatttccagagtatttgctaaagacttagcttaatggattctccaagggaaccttttcagatttagtcagatcgtgaacagaatctcagttcacatactcaaaccatcctgcttatttcaggggtgaagtttattttattttgaagaaagggtttatcagagtttaaacaggagttcgggaggaaggtttaaaccatgtaataaaagtgttacacactttataaatctataaataatatcaattgcaagctatttgctattgattagagccagttttattcttcaaagaattatctagttctggcttatttcatttaaggaagttttttttttgggtttttttttttttttttgagacagagtctcactctgtcacccaggctggagtgcagtggcacgatctcggctcactgcaaccaccacctcccgggttcaagcaattccctgcctcaggctcccaagtagctgggactacaggcacccgccaccaagcccagctaatttttgtatttttagtagagacggggcttcaccgtcttggccaggctggtctccatctcctgacctcgtgatctacccaaagtgttgggattacaggcgtgagccacygtacctggcccatttaaggaagtttttaatacaaagtttaccaagtcattattttctccttccttcagattagtcctaatgagttagaatttactatagtgtatgtgggtttttaattttctttttatcattatattctggtattttaaatttttaataggataggaggttctagagatattacattggctttgtgaagtatagacatatggttgggctctgagtattggcaccctaatgcccatcaccatttctaggcatctcttcataattctttcagaaagcaagaccatttgccaactttaggaatgtgctacaagggaatattytgaaacaaaaaccaaaaaaccccagtagcactatgagattctgttttytgaaagatttgggaagaagggtaaagagtttaatctgtcagggttataagaggggaaaaaaacttgatggaatgtgagaaagatttataaaattgaacatatactaaacgaaattggttyttaaccttagcccctcctcccaaatcctgcagaaacaattgggaagagacagtgattgacgtgttgggagaagtcagagagtagcctcggccttcccccatttytggtgggaaagttgctggcttagtaggaaccatgtgattacatggcttttagggaaagacaatgtatccttaaaaaaaaaaacatttcatggattttccttataagttttcaactttttgtcttccttttgtatagcaaatccagtttgctgatgacatgcaggagttcaccaaattccccaccaaaactggccgaagatctttgtctcgctcgatctcacagtcctccactgacagctacagttcaggtaggtgtgaatgaactccatgtcctctctaatctctcttccctgtttgctaccagtgctcttcacttagcaatctgaaaatacctcatgttatgactgcccacctttgtgctgaaaactgttagtggctgggcagtgggaatgttctgcagccaagctagtagctggggaagcttttgtcgactcgagactttcttccccctggctgtctgtgtgtgtggtctgtggccagtgcccagttggtaggactgggctagttcccattcccacattgatccgcccatttcaaaaggaagaaatcaatgctattttggctgacagaattggacttaaaaaagaagtgcattttgaagcacgatttctttgtgtaaaatataccctgtcacctatctctttctttcttgtctccaagactgcttagattgtaacaataaaattagtattttggcttctcttatttattaggttattctttctgttggaatatcctcccctgttagactctggagcaggaaagattcagactactgtaatgtaactccagctctgtttctttttagttctctcctcctgtcttaactctctgtaaataaagtctttttctgttttgtattgtgtctttcccaactatagagcatgtattagaaaattagcatggaaaagaatatagaatcttggcagatgaatacaggagaaaacattagggacatctaatggggcatccaatacaaccttgtcattgtttaactgaagactcattgttaaaagattaagaggttacagattgctattaatgtcagcagagatatttgtaccaaaagccattcattgtcctttgccagaataccttttgcattgtattatcaacattaaggattaacataaatgaaaagctgttatatatgatcctggagtgacagataaaaagtggtgtgtgacaagcaggctaactgtagccaagaaagaagaaaaattaattgtgaaaaattgagttatgagaggaagaacgataaaacgactgaagaaggcttttaaaaagtcttcaaagatcttgacggccatgttacagaaatgtattagagccttttaaaaagcttagtgatatggttaaaatgtcatagtggggaagataatctttagtagtatttgtgttagctggacaggaggaggacctgtacatagaagtcagtcagtgagagagtccaggtatactagcagaaaccgtgatgaggaaagtactcaattcagagaggaaagaagtgatttgagaggtaaggaatgattgttgtatatcctcttgcatatctgtcagataagtggtatttttagcttttatgtgaaaccactttttaaagttgatcattttgacagactttcccagggctatcagtagaaccagagctgtttgccttttgtgccatttctttctttctctattccttgagcacaacttagtgtaaaatcccttgtaagactatcttatcacttttgtctatatccatggttctcaaagtgtgatcctctgactagcagcatcagcaacacctggtaacttgttggaactactaatgcttaggtgccactccatacctgccagatgggaaactggccacagggtctagcaatatatgttttaacaaaccttccatgtgatcctgatagatgcttgaatttgagaaccagtgatctatagaaatagcattccttatctgccctaaattattcttctgtttttgccaggtctggttccaatccagatgggaccaagtacctctattatctgggattactatagctgcaggtttataatcagtggtcccttgtcataggcactaatagcacagtattgttagggtgggtgaaagagctgcaacatggaagtacccacaacagtttcattcataccacctattagaacctagaggagcagaactgagagcgttgtaaaaggtagctccaattaagggtgttcccttaacttaaatgaaagtcccttggggactgcactctgtagagttggggaccactgaggtttttctatccttgtttttttctttcctggctctagctgcatcctacacagatagctctgatgatgaggtttctccccgagagaagcagcaaaccaactccaagggcagcagcaatttctgtgtgaagaacatcaagcaggcagaatttggacgccgggagattgagattgcagagcaaggtaaagaaagggagtgggttaggggaccagaaacaaccctcttgttggccatcagaatccacaaacaacttaagacttgaaagctgacttgaaagtgtactgggaagaaagacagtattatggactttcggataaacrcttctctctctatggaacttaagtcttgggattttgttctctcttccttctgttctcagcatgtggtgattacacacagagtagtttctgttttcctccttgccccaccccaccactgtattcaaagatctacatggcagaattgacaagtcctagatcactacgtggtagttggttatatgggatcttactatagctgccaatggcagagacccagattgcccagaagcagctgatgaggaagggttttaaggtaaggatgtggtgacctagagtcttgtttggtcctgagcaccctctgctggagcagagtaaaagtgactgacagttaaatcttggtttctctaccccagccactcccagtaaggtcctctttactcttgtgttgtttacacattgaaggcatgttctatactgagagagaatagagaaaccaaacagactgacaggacatggtaagacagcatagaaaaacagaagttagtggtttcggctgagggtacagtctttctggtctgatgattatatataggaatctattagccaatgccttaactattttcctctcttcccaaatgaatgatgagactcacccttcattttgatcagttttaaggatttacttcattctctgttcagtcctctgtgtataaagctgaagcagtagaggaagagagaaactccaagtggttgcatgactgctctccactattactgtgccgttgaagctgccagtcgtcatggaaataggcttaaagtttttctgcctcatctcaccatatctcaacagatccagaccagccctggggcaggaactgatgatactgctagtgcagacctagctcaaatcctctgttctttcacagacatgtctgctctgatttcactcaggaaacgtgctcagggggagaagcccttggctggtgctaaaatagtgggctgtacacacatcacagcccagacagcggtgagtttgttggaagaaaagagggacttctgataaggggaagaaagaaatcaattttttttttttcacttttcctttcctaactcgccaacctccaaatgctaactattaataggatctccctgttacacaataatggggttttctgggtttttttttaatatgtaaacccactttcagcaaacttgacctaggaaagtctagatttgcaaacatatgattgttataaaatgttataaagacttttagaaacctatgttttatgcaaagttaaataccagtgcaccacctcgctggagtacacccttttgtaactttccagtgtagcacctgttggtgcagagttgataggtattgctatcttgatgaggcttgctctccattcctgggtggcccttctcttcctcaccctgtcttcctacacttctacacaggtgttgattgagacactctgtgccctgggggctcagtgccgctggtctgcttgtaacatctactcaactcaraatgaagtagctgcagcactggctgaggctggtaagttcggttttttcccaccaactttgccccaaaatagttatccaaacatataacttttttgtatcaaaattgtcattacaatatcatatatgtctagaggctataaaattgtgcatgataaaaacctcaacaggaagaaagtggataataaaattaagatggatatccatggtggaatattatgtagtcattaaaaatggcctttgaaaataatctaatggcatggggtcatgcccagttctagtgttagttgaacgaggaagaatgttaaactatataagtgccatcaattttgtgagagagcacaagtaagaagtacctttcatattgatagtgcattaaataatttggtattcagtatggcattgaaaatatatgagctatttgtgagtttaattaaacgtaaaataattttttattattcaggccaggcctggtggcccacgcctataatcccagcactttgggaggccgaggcgggcagatcacttgaggccaagagttcaagaacggtctggccaacatggtgaaaccccacctctactaaaaatacaaaagttagccgggagtggtggtgtgcgcctgtaatctcagctactcaggaggctgaggtaggagaaccacttgaacctgggaggcagaggctgcagtgagccgagatcatgccactgcactgcagcctgggcgacagagtgaaactccatctcaaaaattaataacaataataataatttttattattcaaatattcagaagaaaatcaccgtgaagtttctttgaggacctctcatctttctttctttttttttttttcttaagatggagtcttactctgttgcccaggctggagtgcaatggcgcagtctcggctcactgcaacccctgcctcctgggttcaagtgattctcatgcctcagcctcctgagtagctgggattgcagtggcatgccaccacacccagctaatttttgtatttttagtagagatggggtttcaccatgttggccaggctggtctcgaactcctgacctcaagtgatctgcctgccttggcctcccaaagtgctgggattacaggcgtgagacaccacacccagccggacctctcatctttttaagatcctcagaaagcaactttataatacttttgggtttttttgtttattcttttctgataagtgttcactgcaaaaaatttaggaagttccccaaaaccctacaatcccactacatagagtatttgattaatgtttttccttttcctttcttctactttacataaattctaatatgtatacagttttataacctaaatacaatattttcagacgtagttttccatgtcactgaaaactttgacagcatcatttgtaatagtcattcatatggctatgtgatttcacctcactattttcctaatggagaacatttaggttgtttcaagatgtttactaatatcaataatgctccagttaacaacttttattaattcccacttcattttatctccttctaagtataaaattagtccagagaaaggaacactttaaggttccaaactacttttaaagcaaaaattccttaatttcttaacctaattaatttctgaaccaaaagtgattctttgacttttggctctgaattttttcccttctgaaattgtttcttttgcctttttctcttcacatggatctcagaaagtgatttggtacaggacactcctcaaaggaggaatcagctgattcatttctgtctctacaggagttgcagtgttcgcttggaagggcgagtcagaagatgacttctggtggtgtattgaccgctgtgtgaacatggatgggtggcaggccaacatggtaataatgcatatacatcctacactttgacaatagatttatttcctttttttccctcaaagcatggttccctaaatatgttttggatgtttggtcttatgcactgactttgttgctaaagtgtttagcttgatacctattcagaatgggtctgagtactgaatggaaaggtgggggaagggtaagactagctgaacacatggctcaaacacaccagaacaaaatagtggtgcttctttggagtaggattctgctttctttccttcctgccccagttctccttttgcattcaaaggggctatatatttcaagactctagactaaaaatgagtctgtgattagcttaatactcatcactgtagcctaaagcaaacctaggaatccttttaaccattttacaccaacaaatttgactgtatttccactctctaagcctgctctagggagctytgaggagtactcttccaaaacatacagggctctcttactagtacagaaagtgggttcaaagttccccccagccctagcagcctgaatgcccatagaagtcttctggctgttctatagatcctggatgatgggggagacttaacccactgggtttataagaagtatccaaacgtgtttaagaagatccgaggcattgtggaagagagcgtgactggtgttcacaggtaacagattctggagtagctgccccttgtgtcctygcctcagcaaactctcctggtctctgttaggctttaggactgtgtttcagacttataactaaatgggartatcttcattagataaaacttttgagtttttacttttgaaaaatcaagttgatcctagaaggaagttatttcaggttctagttcatacatttttctctcccatttactccattgagtgattctcaactagtgttgaggggcgggtagggaataaatgtatcttgaaaaactgtattcaatattgtattatcattttatatttgaaatatgaaaaacaatcctattgtaaaactacatgttatacacactacaaaaagtaaaactgggcaaaatattcttggcttgttggaatactgaaaagatatctgaaagagtgtttcttgggggcacattgcgcatgcttactcacacacacacggaaccatatcagaatcattgatagtctttgtttatcagaagtaggcatgggtttctattgaaaaatgctgatcaaaggaaataacactccctataaagggaagagaagtacatttcttcaattgaaaggcttttttttttcttccaaaaaaggggtaaagggagaagaaaatgaaaagaagtgtggagggatgacaaggaaataatcatgttttctaatatccttgggcaataaatgagactgggaagggcagcatggaacttgaagagaattaggcagattttgccacaaattatgttgtgccagctaacttggtttttgtttgtttttgtgacctcttctctctttaggctgtatcagctctccaaagctgggaagctctgtgttccggccatgaacgtcaatgattctgttaccaaacagaagtttgataacttgtactgctgccgagaatccattttggatgggtaggttgaatgtatatatattcaaacttctaggggctctggtcttcctttggctttaaaagtttattagagggaccatttcatactgagctcaaccagcttccaattgatattctcatgggcattggcccacacttttaactttgtgaagagggactgagtttgagctattaacgtttgagttgagcccttgtctgtttccacagcctgaagaggaccacagatgtgatgtttggtgggaaacaagtggtggtgtgtggctatggtgaggtaaatagctgggtctcagwgyctctttctttttgtgtacttattagaaatattgggtaaaggaggcttgtgctgtcaatctagagtcactgatacaaggtttaaatttttttagataatgtatctcaaacaatagcaaaagccttttattcagatttatgaatagaaacatacaaaatgaattgagttttcagattttaccattttgccttgtggaatagatactagtatcatcttccccaattataacaataacctttaatgagacttaattcaagtgaatatatagcattttagccccacaagtgacttgcagtagaattaagggtggaatctgaaatggcatatagttgaatatctccaaactggaataggtcacatattttgttgtcttcagcaatgacccaaagaagttcctgagctacgagggtatccttgagtagattcttctcaagtaagagaataggaaattagaggttgcttagagtaagttgcttttgcttagtcttgtttccctgatgaaaactgctatgcaaagccccagtccttcctatgacatgtctgctaaattacctctctaactgaggttcacaacgtaatctgggtctgtttctgttctgcttgggattggagcgtctgtgcagctgctcaccagatgacaggctatttcatgaaggttaattcctgtctcacaaataacctacctaccctaaatatccatgacttaatgaacctaacgacttgacctttcttttgttctgcaggtaggcaagggctgctgtgctgctctcaaagctcttggagcaattgtctacattaccgaaatcgaccccatctgtgctctgcaggcctggtaagaacagagtgataatactattagattcactctaggtgctttatgttattgagagttcataattgagtatattaatcatttttgcagaaatcacctaggggaagagaaggctaggactgctctgttcttctcactctaaccctagggctctctgagagcctcttggcatttttccttcctagagggagtcttggggactctgaagaggccagtgtatatagtttagcagagcttatcactcaccattcctgtgaggtggcactggatccaactagaaggggatcttgtctcatttcatgaccatcttccctcccactgccttcttgctttactcatagtgttcctttcttttcttccagcatggatgggttcagggtggtaaagctaaatgaagtcatccggcaagtcgatgtcgtaataacttgcacaggtaaataacttgcatagagaagtgtttattcagaggctaaatcttgaaagtagtctgagtgactttcatacaaaggaggtgagacctctgttcagtataaaggtctcagaactagaataagctatcagaaccttaacatgttttccagagtaaaaaacttttttccctggtgactttttatactgcttgatctgaagaccagatagcctaaggagcggttatgcatgtcttctctcagaatgtctacatgttctttaatgccagcaagcctctggtytcctatgttctacctgaaagccagccagtacctttgttgcccggcatctctttccttaaccacccatcttttcttttaggaaataagaatgtagtgacacgggagcacttggatcgcatgaaaaacagttgtatcgtatgcaatatgggccactccaacacagaaatcgatgtggtaaggcttctctcatttgttgctaggcatttctctactacctttcattaataaccatagtcaactgtgctttcttcctttcagaccagcctccgcactccggagctgacgtgggagcgagtacgttctcaggtggaccatgtcatctggccagatggcaaacgagttgtcctcctggcagaggtacacacagagaaggaccctggcagagcagcacaagcagagtagttagatctatgaggggggaggggagggaaacaaatattaggcctatgtttccctgaattttatctttggagagagagatatttcacaaattggtccccaaaataaaaccactttaaaaaaatctactttttactaagtaacactatttcctaaccacagctgattctttaacctttcagactcagatggatttgcagaaaataggaaaaagcctagagtcctgatctggaactgtaattcttcctcttccaactgagtctagaggggtgtaaagtcctctcccgctttggcttgacttgtatgccattggaatctgagacagagctcatcccagggctctctcttacctttccagggtcgtctactcaatttgagctgctccacagttcccacctttgttctgtccatcacagccacaacacaggtatgtggcaaaatgcctgcttacactgcactgcaatttgtggaactgggcgtagatcagttccagtgagggtgtactgtactatgttctcatcatcctattcttttttgatgtaataaattgtggaaacaggtattcttaagtatagaaaagagtcactaagtcagtattcgttgaattggctgttttagttgagaatataatgttccagcttagttttatttgatttgttctttcgttaggaactaaacaaaaacaacaaatcctcttaggatgtgtgctgccctttagtataggcaaagtcctaggtactgtgactgtggtagatcactgtagtacttacccaaatgctgtttaacctggttttatttttatgtgcctgtctaagaaatatttttgtgctttctggccttcttttcccaccttaggctttggcactgatagaactctataatgcacccgaggggcgatacaagcaggatgtgtacttgcttcctaagaaaatgggtgagtgaaaaacagtggaaatctatgcagacagctgcatagtttggtaaaatgactgccatgaaaggcattggatttagagtcagagttccaattcctgttcctgtgcttactggttgtttgacctcaggacaagttctaatctctatgatcctcagtttcttgattggtaaaatgaaaataatactacatacattgtagaattgtgtgagaatcacagctaatgagtaacagtgcttaacacaatggtttagggagatgttcttactctaagtagccttatgaagttcagtaaacttcccagtgcagctgagtacatacagccttggaacaaaatgagagaaacaaacacaggttttattgtccattttctgtgaggatatgcaaaccatccaatctcttgtaagcaacccatgctgtgttcatgtgacataatacatcatctctagtcctttgcctttctgcacggtgtacccatctcccatatctccttggctagcccaaatccctgacttcttaatgctaaaatacttcttgctctcctctcctccaatagcttacttcagacttttttttcagtgtataattataaaagggaagcttatctatggaaaagtaaaaattctgtgccgactaccttagaaattcatgatcctaagatccatggatcttatcctaaatgagtgttattgacacagggtctttctagcttactggtgtccactttgattgctaatttgactataatctagttaaggaggttgctgcaggaaggtaggagtagcatgtgacatgtgggccactgcagggaagccccctgctttgccagagaaggatagagaggtaaaagcccactcccttttgttaccctggtaagtggcttttctgaacgcacygtacatgtgctgagagaagcaycctgcccagaaaggcagctttgaggttttttttttaattaagcaaatatttcaagttgtggattctttcagagttattccatcccttgtctgctttcttaaaaaagcttcaaatgaaaatgggaagttataacttgagagacattttgaaaaggagtctgctctcctgccactttgctcttcctagatgaatacgttgccagcttgcatctgccatcatttgatgcccaccttacagagctgacagatgaccaagcaaaatatctgggactcaacaaaaatgggccattcaaacctaattattacaggtaacctggggagaagcaagtgaaaagctctttttcccagtattaaaccaagcaggctagcctgcttctgacataaagatcaaatgttgtacctgattttgaagaatacaagaaatctgttccaggccaggcacggtggctcacgcctgtaatcccagcactttgagaggcctaggcggatggatcacttgaggtcaggagttcaagaccagcctggccaacatggcgaaaccctatctcttagccgggtgtggtggcgggcacctgtcatcccagttactcaggtggctgaggcacgagaatcacttgaacctgggaggcggaggttgcagtgagctggratcatgccactgcactccagcctgggtgatggagtgagactctgtcttaaaaacaaacaaacaaacaaaaaaactgttccagttaacaaggtagatagagaaattgtgggagatatcagggagttagggtttttttgaaattttggagcctgggcctcaccctaagagattctgatatatttggtctgcgatgggaccaaatttacaaaacattattttgtaaaacctccccagattattgtaatgtttagtcagggttgaaaaaacactgactcattcctgggaacaggcggtaacaccagaaatggcattgtcagagaccctgtggaagaataagggagactggtgccctggggaatgactgcagggatcccacccaggctggggaggggccctggaraaggtgctctgtttccgattgttttttggaattctcatatggaagacataagtgttaaccaatcactctctctctttacagatactaatggaccatactaccaaggaccagtccacctgaaccacacactctaaagaaatattttttaagataacttttattttcttcttactcctttcctcttgatttttttcctataatttcattcttgttttttcatctcattatccaagttctgcagaccacacaggaacttgcttcatggctctttagatgaaatagaagttcagggttcctcactctagtcactaaagaaggattttactctcccagcccaraaaggtgattctttctttaccatttctggggactttagtcttaattaggtaccttattaacaggaaatgctaaggtaccttctctgtggaacaatctgcaatgtctaaatcgccttaaaagagcccatttcttagctgctgaaatcagtgctctttcacttcttcagagaagcagggatggtacctacccggcaggtaggttagatgtgggtggtgcatgttaatttcccttagaagttccaagccctgtttcctgcktaaaggtggtatgtccagttcaragatgtgtataatgagcatggcttgttaagatcaggaggcccacttggatttatagtatagcccttcctccactcccaccagacttgctcatttttcgagtttttaactagactacactctattgagtttaattttgtcctctaggatttatttctgttgtccaaaaaaaaaaaaaaagaaaaraaaaattaaggagaatttttggtgttaatgctgaggaattgcttgagtggttagttgttaccaatttctcttttgaacctttggagctaaggatgctgagtctrgagaaatgctagtctcaagccctgttaagtccctctgtttctagcccgtagttcatagcatcagtgaactggagccacaacagcaaattctatcagctgtgtaccatacagcttgtgctgaaggcgaatttcttgagccattactcagtataaagcactgagttctatctttaggatttatctttaaragcaaatttctggtcagctgtgcttctgcaacctaaaatatttaaagggaggtaggtgtgggcaggaggaggaatgataaattgggccagggcaagaaaaatctagcttcatataatttgtctgggactatacaccctatataatgttagttttacagaagtaatatgacttttgattgctacataccacaaagagtttatgaactgagatcataaagggcaactgatgtgtgaagaaagtagtcagtacatcctggctcatgctctgaaagaatatccagagaggctctctcaaagatcagggagatgtattcccatgccatgcaccctgcttcccagcatttctgcatggtcaagtgagctttatgctcatgagctwtaagtatataattatccaggattttaaatcctcaacttgttctagcttgtgatccctcaaagttgggtcatacgttagtgctagatactagaaattttcacttttccactgatcagagagacagacattaaaaacaaaaatagaagaaaggaaagctttcaccctgcagcttcttagcagggaacaattgtcttgccaaaacttttttcccttttctctcccattttcttttacccaatcccttcttactccttgccagtgtgaccatgctttcttctctgtagatgttaacagttaaggcctattttcctcgggcacttaaccaaccaatcagaacaccacatctgttaggggaggtaacctggccaacagtgtatccatcacgttagccctgctggagggaagggacccacattcacctgccctctgacctgccccttgatcccatatctattaccgtgtccataggaataataggtaagggctctgtctctgtcaagccatgtaacaaaggacactgttaaaaaaaaaaaaaagtctggcatcagagggagcatgtggagagcaacttgggaagaacaagttcattttgtattgaatgatttttaatgaatgcaatattaatccttgcagatgagcaataatcattaaaatcgattaaaatgataagaccttattggcagtccgtatgtgtcattctttgttaaacagcaaaacttcattagaacctgttttctagggtgtgacaagttataggtcagtagcatttaatagagatttgttgagggcctaatatatagaggctggatacaggattcttcaaagtaatacctgaagttttgtatgcctgctctgtgccaagcaccgggcctgggtactttcactcctaacttccttcaggaagcagacttgctgcttaagcctcagggttcctcatttgcatagtccttctaagacctaatttctgaagaatgcccccaaagttatgtaagcttcagcctcctcccacacctgtatccatttctgaagtggtctcagtgtcttttttttttttttttctctttatttttttgagacaaggtctcactgtcacccaggttggagtgcagtggcttgatctcagctcactgcaacttctgccttccgggctcaagtgatcctcccacctcaacctcccaagtagctgggaccacagtgtcagctaattgtttgtatttttggtagagatggggtttcgccatgaaatctaggctgatctcaaactcctgggctcaagtgatcctcctgcctctgcctcccaaagtgctgggattactggccagtgtcttctgatgtaagaaagtatttatcttggtcagtttctgctgctccagcaaaatcctgagactgagtaatttataaagaacagaaattgatattctcacagttggaggctgggaagtccaaggtcaagtcgttggcagatttggtgtctgaagagggctgctgcctgcttccaagatggtacctcttatgcatcctcatatagcagaaggtagaagggcaaaaaggacctaactattacctcatatatgccaaagtctgttttagatactggggatacatcagtttaaatcagatgatctcttcctttgtggtgtttacgtaaaattccaacaagatccaaattccttccctttttcctttacccacaatttggccattaggtaagacagagcaagctagggattcatgtggatttgcagcctgtgagtgtgggtggtatccttgtgggaactggggatgtagcttggtacaaggagtcagatcccaagtggcgtggggaatgcatctatgcaggggatgaatggcaatggcagattagttagggataagggatttgatcactgtacgtgaaaatattaagggtagcggaagccagctgtctcattttggaggaaggtgttacacattggaaagggaaaacactagaatgaactctgctgttgggtttgaataggagatgatagtgtgaagtcataaatatcaacctagttaaagaaatacagatgtcaatgtacgtgtgtgtgtgtgtacaaacactccctagctctctctactaagcaagccttggagcagcagttcccctcttcccccagtgcacatacctgacctcgaggtctaggcactacattctccaccgaaagaagccaggactcgttggagagatgactgattccatggcagagcaaaaaaaagtacaagataaaccagaaagcaaggaaggccttaaaaaaggatacataagccagctgtaagggatttacatggggtaaatctgagacaacctgagcatcagcatagtaatgatttgtaatccattgaacaaaatagaaaactatgactctgctaatagaaatgaatgagtaagtaaacagaagtttaatgaggaattgtatatgtatatactttttttctaatttatttatttatttttgagatggagcttcactctgtcgcccaggctggaatgcaatggcatgatcttggctcactgcaaactctgcctcccgggttcaagcgattcctgtgcctcagcctcccgagtagctgggattacaggtttccgccaccacacctggctaatttttgtatttttagtagagatgggctttcaccatgttggccaggctggtcttgagctcctgacctcaggtgatccacctgcctcagcctcccaaagtgctgggattacaggcgtgagccactgtgcctggcctatgtatactttcaaagtagccttccataaagtatttcttaaataaaataatggggaaaagagtagcttcacagtagtgaagtctggctggcagaccaccttaatcaatggaaagaaacgaacttcagtaatgggacaaatctagatcttcacaagatctagacaaatctagataagttgcttgagaagaacacagcatcccttcttttttttttttttttttttttttttttttgagacggagtctcgctctgtcgcccaggctggagtgcagtggcgcgatctcggctcactgcaagctccgcctcccgggttcacgccattctcctgcctcagcctcccgagtagctgggactacaggcgcccgctaccacgcccggctaattttttgtatttttagtagagacggggtttcaccgtgttagccaggatggtctcgatctcctgacctcgtgatccgcccgcctcggcctcccaaagtgctgggattacaggcgtgagccaccgcgcccggccagcatcccttctatgacaaatccacattgaaggacactttacaaaaggactggcctataatattctaaagtatcaaagtcaaagaatgactgaagaactgcaggagactaatacaacaactaaatgctatcctgaacttgttcattttgctatataaagatacaaaggaccttattgggacagctggtaaaacttgaaagggcttggaggatgagacgatagtaatatctgttaatttccaaatgttaatggctgaactgtggttatagagaatgcttgtttgtaggaaatcaacactaaagtattagaagtgatgggttatcaagtcaacaattcactttcagatgggtccggaaaaaaattatttgtaatatacttgctacttttttgttagtttgattatttcaaagttaaaattttgttcaatgagaatttgaagataaaaaagtcagaccagcttgatcaagaaaattttaaaaatcaattgtgctctatttagggacatcttagaccaaaaataaaggtgaagccttttggattagtaaaggagaataaaaatcaacagaaaaacagtatttcacatgtctatacaaaaaaagtatttcattgacaatacgtcacaactaaagtaatacacagacctgggggttcgacaagaaagtggaggccggtacagtggctttctcctgtaatcccagcatgttgtgaggccagggtgggagggctggttgagctcaggagtttgagaccagcctacacaacattagtgagactcatttaaaaaattagccgggtgtggtgctgcacgcctgtagtcccagctactttgagggctcaggtgggaagattgcttgagcccaggaagtcaaggctgcagtgtaaccctgatcacgccactgcattccagcctgggtggaagagtgagaccctgtctcaaaaaaaaaaaaaaaaaaaaaagtgacgagtggggttgcaagaaactactccagagtgttccttggttatggatactgaacaaagtcttccccaccaaataacttctgaattcaggacatttctagagaaatttgtaaattttgaaagaacgtaaaagaagaattaacgtcggtacttctctgctaactgggtatgaaacactgggttagagcaatggttggcaaaattatagctctcccaccagccaaaccagcctaccgcttgtgtttgtgtagttcacaagctaagaatggtttttacatttttaaacagttggaaaaaaaatcaccaatattgtgtgacatgtgaaaattatataaaattcaaattttagtgtccaaaaatggaacttttatacacagccccactcattgatttatgaaatgtctatggctactttcatgccacagtggtagagttgaataggtgcaaacaaatggcctacaaaacccaaaatgcttactatctggccttttacagaaagtttgctgatcccaggtataaaggttgtgtcaagtatgaagggaaagatgtatcagaatgtgtctgatttgcagtctgttaggtaagaagagggatctctgtgtgagagcagaaacagagaatgaacatattagaaagaaaaggatatcaaagagttttccagtctaggttgcagatgctaaattcacctgcatcctggccaggattcactttaggattaggaaatctcagcaaactgataaagcaactcagatagtgcttgggaaggtaattgttattgcaatttagaatatgtacttgagtaatcaatttaaacttgcaattttaagttgcaaccaattttacatacagtattggaaatttatattatgtattggaaacatataagtacacagtatcagaacttttaagaatagtattttggccaggcatggttgctcatgcctgcaaccccaacagtttaggagaccgaggcaggcggatcacctgaggtcaggagttcgagaccagcctggctaacatggtgaaaccccgattctactaaaaatacaaaaaattagtcgagtgtggcggcatgtgcctgtaatcccagctgcttgggaggctgagtcaggaaaatcgcttgaacccaggaggcggaggttgcagtgagctgagattgcaccattgcactccagcttgggcaacaagagcaaaactctgtctcaaattaaaaaaaaaaaaaagaaaaagaaaaagaaagaaaaaagaatagtattttgtttgcttttattttgtttgtattttgtgccagacaattgaagtaatcccaaaaggtaacttaatatattaaatgtataaacatatttgaaagggtttaaaggagtttaagtttttaagtggggtattcaaaaccccttagaagtcattaatatttgctgggtttttacaataagatttataagctgaacttttttttttttctattgagacggagtctctctctgtcatccaggctggagtgcagtggcgtgatcttggctcactgcaacctctgcctcccgggttcaagcgatgctcccatctcagcctcctgagtagttggaactacaggcatgcaccaccactcctagctaagattttgtatttttagtagagatggggtttcaacatcttggccaggctggtcttgaactcctgacctcaagtgatctacccgccttggcttcccaaagtgctgggattacaggtgcaagccaccgcgcctggcctataagctgaactttgaaaagcttaagtaatgtttttgttactttaatatattgaatattaatttattaagctgaaatagcatctcatctgtccacacaggcagcccttgaagacattttattttatgattattatttttttgagaagtctcactctgttgcccaagctggagtgcagtggtgcaatctcagctcactgcaacctccacctcccaggttcaagcgattctcctgcctcagcctcccgagtagctgggaccacaggcgcatgccaccacgcctggctaattttttttttttttttttttttggtatttttagtagagacggggtttcactgcattagccaggatggtctcgatctcctgacctggtgatcggcccgcctcagccttccaaagtgctgggattacaggcgttagccaccccgcccgacctttgaagacattttaaaatgtccttagtagagacggggtttcactgcattagccaggatggtctcgatctcctgacctggtgatcggtccgcctcagccttccaaagtgctgggattacaggcgttagccaccccgcccgacctttgaagacattttaaaatgtcctccagaaggaattgtcctgggttgtggccctgagggtacttgtctttgatccaggcctttcttcctcatctggctgtcttgtggcgtagctctc

SEQ ID NO: 95744 - DNA, 24005 bp, Homo sapiens
  misc_feature (1)...(24005): n = A,T,C or G
aatcagctcagagaagagacaaaggcctcttcaagggaagcccttacttagggtgatagaaattctttttctttttgctcctttgtgccacattcttccatcggtcagcaggcaactgacaggtgtacccctccctgagccccattcagagttcccctccctgccatttgtctctcacccagatatccagcagacaccaccatccacaggagctgaatatgattagcagaaacccttcctgacagctccaaagaggatccctcaaatgcatattctattgagtgcatctcattgctgctgasagccgctttatcaattaaattccacattcygtcttcagagatgccatgaacctccctacctaataaatcataggcccccagttattgttaaatgtcccatcagtctctaataaactccctgccaaaaggggcaggttatttattatgctgcctggacaagaataaattgggcccctttctcgaaagaagagcwaacacgccaccttcctccytaaagactgaggcagtggtgttaaatgggacaattaatcaatgtgggccttgkgcagagaggaatctggtctgaagcctgagggaggatcacctggggttctcttccaaagccagtcaggcaatcyccatggtggggggtggctgtgcagtgggcatgggctcaggcttttgctagttctccctctttcctaattcctgaggctagtcaccccataagccatgagacacatgtaaaaatgggtattttccacgttgggaggtagccagctaggattgagcagggtcatgaaataatacattctatctagaagggcagaagttgtttcttgataaacttgatacaacataagtttatagatggtgccagttcactgaacagatggctcaagaatataacaatgaaagtacccgtggctaggcaaagcaactaggaagcataagctagttgtgctttgctggataagcagcatgtacataggggtggcactggcacttggaaagcagtgtaccaacacctaaagtcctaggaactgctagatctaagaaacagtgtgtgttgtgggcctttccattacttgcctcatattagatcccaaacctaggtgatgctccaaagtctgcaagttaagatccaaactgctcggctttgccactacccaagccccaagttacatttccagctgtatttctctttactgctaaataacactacccccctttggaagagcataatggatgaggtgctccttaatatagggccagtatatctctgcatcctcatgtccgggtcatttctgccatacctgcctctactcacagtaaaagacttaacttccctaaacaactatggctttcatgcttccacgcctctacacaaactgttctctgtgcctagaatatctttctgagacttgtctgcctggtgagctctctttccactcccactgcctgatgaacgccttattcaggataagctcagggtatcagcccccactgcttcacaggacttgagctttgtctcctggtgctgctgtcttggcagaagtgctggactccaggaattaggtaaacaatgatcttgtatgtgcagttgttctctcatacttccatacatacttgaagcaactttgatttggggtgtggaggagaaggacatagagaagaaagctattgctctttgaataccaaaagctgttttcctcagtttctcagaagttctcactctctcccacgacagccacactttgaacaactaaggccctgaaaaaatgtcagtackgcatrtgattttacaccagcttgtgctacttgcatatttcatgcttgatcatttccccagctgggctgtcaactcttttaggacagaggatagaaagagcctagactttgctgtcaaatagatctgagttccaatcccaattatgagctctgtgactttgagcagattactaatcttcttctgaggagttacttgagggcagcatctccttcggcatctgacatgtagaaggcttttaggataaagtccagacaccaacctggcctacacttcactctcctgctcatcaaagcttactgtcccatttgcattctaagctcttttagaatgtgctatggtggtcctcacctccagacctccgttttcccctcctctgtcacaaggccaactttgattcatttttcagacttactgtagctctcactaatgctaggaagatgtggcagagactgttagttgcctccaatgtcctttcccccttcctctatagtaatggacctcctctcaaatcagtgtacagctgggcacgtgattgtccagaaaaatgacatttcccagatttttttttttttttgcaagaaggtataactttatggctaagttctttccaagaaatgccagatagtgtggcagcttttgagaacatttcttaaaaggactgctggcatgatgaccattaccatttctactttctattttgagtcttcctccttcctgctggctgcaatgcaaacgtgatgactggaactacagcaactgtttggggaccaaggcagaagcctgggtgattgggatctttgtggatcagggctgtttatcagtcctgcttccagaattctctacaagggcaaaatgaacttctatcttggggaggtaagctcctattttggggccttactttcaatcaaacctaatcttgatggctaagtctttcttggctccccacatctggttacctccttgacttcagtagcaccctgcactttatacaggaaatgaggatacctgtttgtgtgcatctgtctccccaagtgcagaggctctgtttactttgttccatttttgtatctctagcacttggctggtttatactaggtgttcagaaaatttttgttgaatgattagagatgttttgtagattgaatgcaaataataatattgcctaccttgtgttgctttgagggtcaaatgagaaaaagtggctttaaaatcttaagttttcttcccttctttccacattcccccaccgatcctcacacccagggtgggccaccttacagtatgccttcctttatactgttttctttttcttttttttttttcttttgagacggagtctcgctctgttgcccaggctagagtgcagtggtgtgatctcggctcactgcaagctctgcttcccgggttcacgccattctcctacctcagcctaccgagtagctgggactacaggtgcccaccaccacgcccggctaactttttgtattttttttctagtagagacagggtttcaccatgttagccaggatggtcttgatctcctgaccttgtgatccgcccacctcggcctcccaaagtgctgggatcacaggcgtgagccaccgcgcctggcctgttttcttttcctctgggttcagaagcctccagtgcaaaatgattggatgagatcatttgaatcttaacacccattctgagtctaagtgtcactctcaccttttcagttcataggaatctctccctcctctagctccctggaaaggctctccaggtagatggaacagcaaatacaaaggtattgaggtgttacaagtcatggagaattaagcatctgggctagttgggtctggttggaggaggtagatgggctgctctgccagagaagagacagggatcccactgttatttatcccgggggaggctgggagacagacacaatcaagcccatttctgtatgtgttatgctcacaccttacctagttattaaatgatttcttgcttttgtgcaagagatctttatagcactaaaaattatggtcaacaacactgttataacttttgactagtgagaaaaaaaatttgtgttattcaccatggttcccaataacattactgcaatatttgtgtctgtaaaacatcaaaaacaacaaatgcagtaacagaatgcctataaaactataaatgttttctggaaatgtagtctttttgcttttcttgggataatcctgtggttcttcagcagtgattggtgtgagttctacagaaccgctgctatgtgcatggagacccagaagagatttttgagcaagaaggtgtcagccattcaatgtttattgggtctaccaggtgcttggtgctggcctggagggcytaggatgacaaaattactgtccttgagaagctcacagtttatttaatgtgaggcacatacaagtaaccaagcaaatacaacataagagccagactggaattatttatagtgtgatgtgggaccctggggtggggaataaaaaagggtatcraaaggagcaggatcaaaaggagcaggatctggagctggacccaaacagcttaagatatccacttaagaaagatcactccagcacctgtggggtacatggctgggatagagaagaaactctggccagagaaaccattcaggaggtttttgcgagttaggatgataaagggatctaaaatatagggcagattctacggagactgaagaagaatgggtgaaatatttggaggcaaaattacttgtgcttggtaaattgttagaaagtggcaaaggagtcaagaataattcccaggtttgtggtctggggattaggcagataaaagaggtgagggcactaagaggaaggctgggacctttagtgccatctccaccatcagtctccattccttcaaacggatagttgacattttctcaatgttttgtacatttccaggcaaaataaaccttcaggaccaccttccaatgggattaccatgtcaaagcccctcctatatcatatggaatctagaccatcactgtgtgtgtgtcaagggggtagggacaatgaccagcattataatctatggacaaagttgggcttggttgcagaatatatttaagtttggtattctttgtatttttaaaaatttgtttactttttaagaatttgagacagggtttctgcatgttgcccaggctggcaactcctggcctcaagcaatcctcccgcctcagcctcccaagaagctggaatcacaggtgcgagccaccccacacaactaaatttggaattatgaatatggctgaggtccagaaatatttaaatttggcatgatgactaagagtttgttataggagctcaatcatttgataaatattgaacatttcctatgtgtcagattgtttttcccactagggatgcagaggagaacaagacagaataggttcttgtcctcatagagtgtgggagacaggcagaagacatataatttcaggtaggtataagtatcataaagaaaaaataaagcaaaacaagagagtgctgggaaaggccagggagcagagaggatgacagagctgtcttagggtgttcaagacctctttgaaaaggaagagctctttgaaaagctgatatttgagcagaagaccacagcaaggaaaagtggcagagactgctagctgcctacgcatgaaatgatgggggaaggagcaatacagaaggcatgtaacatttgagagtctattaggcatcccaagggaggtgctgcggaggcggatgcatggaggcggatgcggaggcggatgcatggaggcggatgcatggaggcagatggatgcacacgtctagagtttaaaaggagatctgaggcggagatacgaacttgggagctgttagtccagttccaggttccaattcaacgtacttttatcagagctcactgtgcgccagggacttgctaggagataaatggggtttatctcaccggagataaatgtggttgcacagcagatggacacaccagccaatgtggtaaataaacccttgggtccagctacgttctgcgcgctctctgccagcacagaggagcagcgagtcagggtacggagcgggtagcgttggggaagaggtggccgcgaagcgagacaggccagcggaacggaaaacggaagcacgagacgsgggcgtgacgcaccgggcgcatcacaaagaacggcgagagggcggtggcgccgggggcacggctgggcggctccgcccagaagagggccgagaggcggggcggtgcccccaccgcaggcccgcggcgccctctgcaggccacaggcagcgactcaccagttgcctcatctttcctctcctccctcttggggctttcctcaggccacattttttgtgtgtctgggcagtctctcagcctccgactcccgtccctttcttccacttccaggccgggcgtgttagtgtcttcgcgggaaaactgccaataaagtttttcttcttctcgctcccaagatccccgcctccccttaagcaccgcgagatctgacggcgcggctaccatggcggcggcatttgaagcctcgggagccttagcrgcagtggcgactgctatgccggctgagcatgtggccgtgcaggtcccggccccagagccaacacccgggcctgtgaggatcctgcggaccgctcaggatctcagcagcccgcggacccgcacgggggatgtgctgttggcggagccggccgacttcgagtcactgctgctttcgcggccggtgctggaggggctgcgggcggccggcttcgagaggccctcgccggtgcagctcaaggccatcccgytggggcgctgcgggctcggtgagagcgggggcccgggataggtcgsggggtggggtgggagaagggggaccgacgggcggcggcggccaggcccgcgccgcagctcaggaagagccctcggtcggcccccggagcagggccctgccgggggctaggcgctacgctcagttaacttatttgtaaaactaacgtgcactattgaacttgaggatagttaagacctttttttaascactgacaaatggttctaagtttgagaagataaacggtaaacgttcagggactaggcgtgttctcatacgtttttgagaatcaactaaaaatgaaggtgccaactaggggaatctcaggagacccttctagttctctgattccatgttagcccctaagttgcttcagtgagtactggctagtgataattgtttttttccttcgcagatttaattgttcaagctaaatctggcaccgggaaaacctgtgtgttctccaccatagctttggactctcttgttcttgaaaacttaagtacccaggtgagttagctgagaggaccagaggaggatgtgttttgtggactttaccacaggtcagatgaaataccagtagctcctcagagctggaagtgaatttgatgaatgattgagttaagtggtggtggtggcgaaatttggaattttctatgcgtaccttatttaaatagaataaagctaccatatatgtcaattttgtcactacttggtaatacagacagggattcttcttttacttactgactagattaatgtgagacttmacatttgacttgattcatggtaatgtagtgctctggctattgttggtaactgcagagtttgttttttttttttgagacggtgtcgctttgtcacmtaggctggagtgcagtggcggatcattgctcactgcaaccttgaacttstgggctccagtgatcctcccacccatcttcmtaagtatttgggactacaggtgtgtgccaccacacctggctagttcttgtattttttgtagagatggggtctccagtgttgcacagaccagccttgaactcstgggttcaagcratcctcccacctttgcctcccaaagtactgggattacaggcatgagycaccacagccggtatgcaggtggttcttaaagctctgtaaatgtatcatattgatctcccatcttccaggttgtcttagagtgtttctaagattgccttacccaaattagcaggaaatttgagtttggggatcatttctccaacaaaggtttgttgagtccstattacgtataaacagtgtgccaggcattggggattcaaagatgaattagatgtgattctcatagccttacttggtagtttagttgttatggcagactgtatttcaagttctcaggcattggtatatctgatgatgaatcttcaacagtggtttttaacccagatatccatgttcatcacctgggaagctttttgagtccatcttatgtctaccaaatcctaggtgatgttgcacattggaaatcctcctacttcccaagaacctgagttagtctaattgtagactaagatgtatttgagattttggcttctgacaatttggcagcagataaaatgctgaaatcctggaaaagtttcatcaaytcatttttttttgagaccgagtctcactctgttgcccaggctggagtcagtggcacaatcttggctcactgcaacctctgcctcccaggttcaagtgattctcctgcctcagcctcccgagtagctgggattacaagtgtgcacaccacacgcccggctaatttttttgtatttttagtagagacggtgtttcgccatgtcggccaggctggtctcaaactcctgacctcaggtaatccacctgcctcagcctcccaacatgctgggatcacaagtgtgagccaccatgcccggcaaattcatatttttaatttcagatctttggattatgaaaattacattattctctgtgtgtgtatcaaagtaatacatattcatttttagaaatagggaaaattcagaaaaattaggacgtaccagaaaacaaaatctgtaatcttactacctagagagaaactgctattaacagttttggcatrttttctcctagtccttttttttttttttttttaaatcaatttttttttcttgtagttaagagcacaaagttttgttttctcctcctccagtagttacattgcaaagtttttaccatgactctcaaggtcttttgtgatctagtccctggaggtagatctctgacctcctttactttcccctgaattctgtcatgtgggccttctttttcttcctcaaatacaccaagaacactgccatcttatggcctttccatttgctgtttcctcttggtgaaaacgcttccccaggggtcatatagccagctctactctatgccattcacgtaggtctctgctcaaagtacctcctttgaggaggtttcatgatcacctcatttaaaatgactccttttttccttgtttgatttttttatgatactttttattacctgtcattacttatttttgtttactgtatatattcttatccaagaatgaaagtaccatgagggcaaagactttgtactgttaactgttgattccccggcaactagtatgttgcctagcacagagtaggttcttacttaatatttgttgaatgaatgaatgaatgaatggaatacagtcagccctccctgtcttcaggttttgtatcagctgattcagccaactgtggatcaaaatactcagggcaggatggaggaacaataaaaaataatacaacaatcaaaagatataaacaaaaatacggtgtraccatttacatagcatttaaattgtattaggtattataaataatctagagatggtttaaaatatgtgggaggatgtacayaggtaatatacagatatatgcaattttatataacagacttgagcatctgccagttttggtatttgggggcttcctggaaccaatcccctgtggataccaagggataactgtaccttaccttatcaataaaaactcatttgaaatgatcatttaaatgaaatatagtgtgtcatgtaatgaatataccagtcccctatgtatttattcctctgactcaaaggtgtaatttatggtttttttttagattttgatcttggctcctacaagagaaattgctgtacagatacattctgttattacagccattggaataaaaatggaaggcttagagtgtcatgtctttattggagggaccccattatcacaagacaaaaccagacttaaaaagtgtcatattgctgttggatctcctggtaagataacaatgcctkttggtaaccarggcttttaaggaactacacacttttaatataacaataaagatatatgggagtctttgataactgtgataattattttgattagaaatgaagagcaggccgggcgcggtggctcacgcctgtaatcccagcactttgggaggccgaggcgggcggatcacgaggtcaggagatcgagaccatcctggctaacayggtgaaaccccgtctctactaaaaatacaaaaaattagccgggcgtggtagcgggcrcctgtagtcccasctactcgggaggctgaggcaggagaatggcgtgaacccgggaggcggagcttgcagtgagccgagatcgcgccactgcactccagcctgggtgacagagcgagactccrtctcaaaaaaaaaaaaaaaaaaaaaagaaatgaagagcaktagaccagtgagatttaggtacatgactggtttaccagtggaatttatgaaatctccattcctaagtatgtttgagaagacatgggataggcttttgagaagaggagaaatgcagtgactttcaggaggcccttctaagccatggattgggattattctttggcttctctattatatttggttgcgaatcactcagaatcagcatcttgcattcagtgctttaggtcttttgatagaaatggtgtttatttactrgtgatgaaacgtgaggggaaaacaatgagtttagtcaagatcagagctccagatttctaatttgtggtttagtgtgtacatgcataatgagagttgaatcaggaaattcagcagaacaacctgtaagtaataagtagagtamcaatattggctgagatttacacaaatttggtacatcataaatatttcaattttttttttttaattaggcagaattaagcaactcatagaacttgactacttgaacccaggcagtatacgcctctttattcttgatgaagcagataagcttttagaagaaggcagcttccaggagcaaataaagtaagaaaaataactaacttgactatwaaaacagtgttccgaagtatctntctttagcttttccaagtggtgattattgtttgaataatttacatggtatctgtttttattttgcagttggatttattcttccttgcctgccagtaaacagatgctggcagtatcagctacttatcccgaatttttggctaatgctttgacaaagtacatgagagatcccacttttgtaagactgaattccagtgatccaagtctcataggtgtgtacagcttttaggtacttatattattggtttatttgtgatatgctggagctttcccttgcctagttttgtcttgctgtttcatggttaccattagcatatatatttgttttaactgatagctcttctttgtaggtttgaagcagtattacaaagttgtcaattcataccctttggcacataaggtttttgaggaaaagactcagcatttacaggaactgttcagcagaattccatttaatcaagctttagtcttttctaatttgcacagcaggtaatgtaacttaaaaggtcatctggggaacttgtgaaataaawggatagtcatggggcaatatttgtaaatttgtaaccatttatgttatatttcatagagcacaacatttggctgatatcctttcttctaaaggctttcctgctgagtgcatttcaggtaagttcatctcttactttaatctttatttagtatactgacttgaagcctccaaagtcaggaggaaaaaataccactttatgagttgtcttgagagtgtgaaattatcttgtatcttttagagtaaaggaattttcaggcttatttttcattggaatttgatatgtcaatattctatttttaaggagtaacttggtatatagtaaaaagttagaaaackagtgttcagaragacaattttattagaatctctcttatagccacatataacttaattstataaaaccaagtttgtctgtattgtgttaagataaaaatattttttctttagaatttttttttttaataattgttaaaatgctggagattgctaactgaattgactgttttatggttttgtggaaggcaaaagtgattgagttcttgctgcaaagttaaatgattactgctggcataataagaatgaaagagtcgaaggattttttgatcagtgagatcctttttagagttttgtttggtgtcagcttaatttttaacctgttggcatgagcttgtttagttatggtatatcacgagatactggggagactattttctaatgaaccaatacttaaactatagatcacactttaacaccaaattataaacagctgattaaagcatttttattttcctaagaattgctagttatacttcatatgtaactttgcaaatagaatgttatatattcaggcatggcctgatcactatttaggattgatttttgaatttcaagttgattgcctaaaccatagtttaaaagattttaactttgsatcttaacctagatttgcacagaaggacagaattaactgtggttggtgtattaaaagtgttaagactgggtgttatgctttttactttttgtggattggataaatatgtattagcttagttgtttttatgtgactttcttttggggtccttttaggcaatatgaatcagaatcagcgtcttgatgctatggctaaactgaagcactttcattgcagagtcctcatttccacagatttggtaaatttcctattcagtttgggtgactaatccatcttgacatatgttctattatcagatgtacagatttcatatattattttatgtaggcgtatctaacaagaataccagaagataattatctttccagtgctgaggaaaatactttcttaaaaatgtctttaatatgtttatctttgtccttgaaattagtcattaggaatgaatttccttttcctctgctcctcagtattcagttcttaatttgtctcttgactgtactggaagartataatatgcattggtatccatgctgtatagttaatgcaaacaaataattgctatcttcttcaattcaagacttctcgtgggattgatgctgagaaggtgaatctggttgtaaatctggatgtaccattggattgggagacatacatgcatcggattgggagagctggccgttttggtaaaaaaaaaawaaaaagtttgagtgctttctttaaggggagggatctataatgtgacaggtgggctttgaatattatttttgtgaaaatgatttactacctaacattctctctgcttttaggtacattggggctgacagtgacctactgttgccggggagaggaagaaaatatgatgatgagaattgcccagaaatgtaatatcaaccttctccctttaccaggtacatttcatctgtttcattatttcaaaataattatagtggtgataagcataataaaaatgataataatagctaacagagtgcttatgatgtgctgggtactgttcccagtcctgtatgtacgttaactcatttacttctcaccacactcctatgaggtgtgtgcawttgttttgtagatgaggatatttagacatagagagggtaagtaaaggtgttacagctagtaagtagcacggagaggagtgcaagctaaccactggcacatgaaaaatgagagctggctaggcgcagtggctcacgcctgtaatcccagcactttgggaggccaggacaggtggatcacmtgaggtcaggagttcaagacgagcctggtcaatgtggtgaaacctcttctctactaaaaatacaaaaattagctgggcgtggtggcaggtgcctgtaatcccaactacttgggaggctgaggcaggagaatcgcttgaacccaggaggtggaggttgcagtgagctgaaatcaagccattgcactccaacctgggcaacaagagtgaaactccgtctcaaaaaaaaaaaaaagaaagaaaaatgagagctatgttagctctattttattagttagtggctttgcaatttgattttattctttgatacaaggggggatattttacctcttaaattgytgtgaaggtaattcttgccatattctcctttgtcaccatgtggaaagaayagcatctttaatttgaatactattttgaaaaattggagtgaaatgttttcttttgatttcagttcagtcatttgttctgcttctttttaagtgccctcttggaaacaacgcatgtttaaaactagtaatgatctcttaaaaacaaaaaattctaaaaaacccttgagtggaaatatggcatttttgacgtgcatgttatacagaaaaygtgcactataaatagtgtctattcatatatagatgtatgtctatatagaaaaatacacatataggtcacgcctgtaatgccagcactttgggaggctgaggcgggcggatgacgaggtcaggagatcaagaccatcctggctaacacagtgaaaccctgtctctactaaaaaaaaatacagaaaattagccgggcatggtggtgggtgtctgtagtcccagctacttggaaggctgaggccggagaatggcatgaacctgggaggtggagcttgcagtgagccaagatccgccattgcactccagcctgggcgaaagtgcgagactcagtctcaaaaaaaaaaaagaaaaatacacatatagtatatacatgactttgcagaatataggatatgtagttattgaataaatataattgagtattttaccgactttatatttaattattttacagagctagattaagcacagatctgggagttctatgtattctagtagatcgggttagtaataactcattttatgatcttttacaaatctctgtaattgctgtaagcttagagtcctgatttgcaaagtactttagagtaaatggtctttaggctctatgtcagttctaaaactgtcagttctttctgtgtataagtctattcgtagtctgatatgggaaaaaaattgaaaattggtagaagagggttaagacttcttgtaggattcaatatcatagcatctagtgataaaaattgcctttggatactggaaaatgatatatttggatctttatgtaatgttaatagggccctgaaatcatgagaaaatgatattcatgctgttaggtctgtattggactgggaacttgtgtaacaacagatgttcagatgagtttcctggggcagaactaggagggaaattggcctgtattataggactaggcaagcaagggatatcaactgagtaggaatgagagttttaatcatagaatctgttcagcaaaggatcaagagacttcattgaagtatccagacctgtgggatttatagataacrtggagcataaatagcaacaacaggcaagatctttgtaaagcaggggcttgatatatcttgtctgcctaagacaaaaattgatcacactttgaaaggtctgagtgtgggaagcaaattgtcacacctggatggaatagaaaatttagagggttgaagccagcaaattttttaaaaattagaaatgtcatttctgattttcatagtcacagatcttttcatagtcatctagttttttcccctatagaggttttctctttatygttaagggcagtgatttctccctgttggaatattgggtgacagatttagttgggtgtacagagttgcagttgtattatttcctagttgataagctttggggagcacaatccattttctaatatcttgttttgctgtcagaagtattgagataaaggggaggggctgtggagagggaggagagaaaagatgggagaattgttgcaggcttgtacattactcctagagtaagctctttttctagtgagagtgaggggagatagtgcttgtgagtatgggatgggtcttacatatttcttaggcangtttctttattacaggattgcttcagtctttaaaaatgttatatctattaaacatcttagtatatttgcatattgtttcttaaatgtatttgatcatagaaaactttatgaaatcattcagaaaacagtggtctagagtagcttgagaattttaatacatttttcttcctttttatgtagatcccattccttctggtctgatggaagaatgtgtggattgggatgtggaagttaaagctgctgtgcatacatatggtatagcaagtgtacctaaccaacccttaaaaaagcaaattcagaaaatagagagaacccttcaaattcagaaagctcatggtgaccacatggcttcctctagaaataattctgtatctggactatcagtcaaatmaaaaaataataccaaacaaaagcttcctgtgaaaagccactcagaatgtggaatcatagaaaaagcaacgtcaccaaaagaactgggctgtgacaggcaatccgaagagcaaatgaagaattctgttcagactcccgttgaaaactccaccaacagtcagcaccaggtcaaagaagctttacctgtgtcactcccccagattccttgtctgtcttcctttaaaatccatcagccatacacgttgacttttgmtgaattggtagaggattatgaacattatattaaagaggggttagagaaacctgtggaaatcatcaggcactacacaggccctggggatcagactgtgaatcctcaaaatggttttgtgagaaataaagttaytgaacagagagtccctktrttggcaagtagtagccaatctggagactctgagagtgacagtgattcttacagctcaagaacctcttcccagagcaaaggaaataagtcatacttggaaggctcttctgataatcagctgaaagactctgaatctacgcctgtggatgatmgtatttctttggaacaaccaccaaatggaagtgacacccccaatccagagaaatatcaagratcacctggaatccagatgaagacaagacttaaagagggggctagccagagagctaagcagagccggagaaacctacccaggcggtcttccttcagattgcagactgaagcccaggaagatgattggtatgactgtcatagggaaayacgtctgagtttttctgatacctatcaggattatgaggagtactggagagcttactacagggcatggcaagaatattatgctgccgcttctcattcatattattggaatgctcagagacatccaagttggatggcagcttatcacatgaataccatttatctacaagaaatgatgcatagtaaccagtgattataggatatacctgagaccatcaggaactgtcaacaaatgatacctttggatatccatcctcctcgacttatagtacagtggtgtatagtggcatttctgataaacttgaaaagacttgagtctttccactgggacacatccatttttcagattgttttgatttaggccaggtatattatcttcatttttaagagtttctttaagaaacttcatcagattgttgaaagataatttttggracatagagctgaaagtttcagggtgccattttctataagatcttcccaaaagaaacatttaaaaagatgacatataccaccacttacttaaaaacaataaaagcaatagatttgattagtaatattattgctgtggagttctttacaaagggcttaggctgcatttccttctatagaggtgcattcttgtagaaatttgtagcatggtagatcagaaaatcctcttaggttttaggcaggaaggaatatttaaacattgctttagattttcctaaaggtatttgatttgatctgttagcttccagtaaaaatatttgtttttagtaaaaacaaatttaaatatatttacatgtttgttgtttatcttttgaatgtcttttgaggctgtgaaagctgtccacatttttgctgtgtattaaatagctgtgggtcatcagttgctgtcttacttgtgttgctcagatagaggagcagctcttaatcttttttggttcttggatccttttatgaatcagctgatagctatagattgacttcaggaaatttctcattccataagcacagaattgtgagtgtaatttcaaggggttcatagaccctctgaagttcatctatacagtccagattaacaagtgacctgctctgctggtaggctaggggaagttctagctcttagttttaagtattttgtggaagctggaattgattctcttcagacacttcttagtacatcctaattttgtgtcttctagaaaattttccccagtttttacctctaatgttaggatccaagaggagcttggatctgagctgatgcatctgtaaattacgatttagaaaaatataattggaaattacatattctttgcttttttcctctggaaatccttttatgattaagcttttggttcccaagcctttctgtgaactggattttttatgagagaaccacttgtgtagagagatgtgtattcactttttaaaaggaaagctcttctttcctgtgtacatacttgtctaggtagtataaacactttccccagggctgtcagcaaacacccacagccattgtcatttattgtccaacacctacataacacaattctaaaatcctacttaacttggattcctgtcatttggattgggcaatattaggcttttcttacatgtgtcagtatgtgaattaattaataatgtagatagcaaatccataattaggtccagtatgtcattaagaagtagagattttaattacacatttaaataagatcctgtcattgatatataattgaatttactttttccatcctttcccccacaatacagccaagttcagtttgtcattgctgggggattttaattagggtactgcctcatcttaattagagacgaggttacccattagtcttcagagtaattggattctctattttgtgcttgcttttttttccccacaaaaataagctggaggtaagcatatgtataacatacaaaaatactaattgcttcaatttccataagcatttaccaggaaaatggcagctgccaccttctcaactaacaggtagctatagttgtggatgtggaagggatcttccacatactgctatttgtgtgtgactcacctttgtgtggaaaaaaattttttttttgattgtcagtctaggtgcatctttccatcatctgttaggaaccatagagaggtttacagtagattcacttgagaaggctctgtggtggtgtgaaaaaggtacttgtcctggttgatactgctactacctactttttaaccttgtaccagtcatttaacctctcatggtccagttttctcatcaataaaatgaaagttggactagaagatttttaggatcccttctagttctatgattatatgacatatgctgaagaaaaaatagtttctagttcaggaaaaggataatcaaatttataaatacagaaagcctttataaattcaagtaatttggacgaaggctgatgtgaattggttaaatgtctgaatttgtgaatacttgtaaatcattaacactgcaactattcacgttaagctgtaacttgaattaggctagcaatattaacatgtagcgagatatttgagaaacctgctactttgaataattctgacttagaatatgaattattttggatgactaaaggtaatattttctaaagtagcttaggtattacagtaatacttattaaccttttaaaatgtggtttaaaggcaaagttcagcccctgaatactaaaaataattgaacatacagtacttgcggatcactctgtatgagacaaagggagtagtatgaagttttatgtttttttcccccttaaatgaaatctacattagtcttttaaaaatatgtatttttgataaccctagctgacagaactccatcgcaaggttattgacttattttggcagaatgtgtttattattttgtacctctgtacacaagcacgtatgtctcacttgacattcagtgcgtcttaatgaaaaagaacacaaattgctcaatgcatatctggtttccagttatttctacccgaagattatttggtctgtgggtctgcagtgacacctagtgggtgataaggatgtgagcatcaatgattaaaatgaatttcacagctaatttctaaggtctttgggcatcatgtatttgttttagtgttccatttctattactgttttcatcaattggatctagttgtggggaaattaaaaggattctcctcattgccaacggtgaaacagactgccggttggtcttatcacctaagtcagaattgttaagtttggaacagatttccaagataactaatccaatccccattttttgttgtttgtttttttagagatgagggtcttattatgttccctaggctggacttgaactcctgggctcaagggatcctcctaccttagcctcccaagtaactggaactacaggcacatgccactatgctctaattctccatttttaacaggaggaaactaactgaagccaagagggagttactgatgggaagtcacaattcagtgctagaacctaaacttgaatctccaccatctgattcccaagctttctacaataccccacagaacatttaattctgagttttctttttaatttgagaacttggtactcagtaaaaccagtactgatacataaagtcagattttctttcaataatatggggtcagtgttcaaaatagagccgttgatagataaaatcgaatgctttacctgttagcgaacatccacaaatacagcatacaagcaggcaagaaccatcagcgatatcatagaggagttgyttatgtttacattgagggatggagtgggaagattactctaggcctttaataacccttctaagattctgtgagttttctctagcaaggtagaaagccaatctgtgttcaaattattctattttctagcatataccagcacctttgggaggaaaggagaatcagtattcaaagaaacagtcattttagggtttgtggcacataatttgtttaatccagattggatacatcaggtacagcagtggcacacgactcaatactgtaaatgatatacatgttttaacatatgcactacagtttcaaaagaagacgacaggaaactcaagggtgtttttttttttcatagaaagttttcatgttttatcttcctgcagttttgtacagtatatttcttctttgccattgtgatgttgataagcaaagcccatttattatacgaaaatagaaaagaacacacttgatgtatctcacgatgacattaatggggggaagggtgtgacctctaaggaaaacattacattggaatgtctgattatcaaaaatataccatccctcccacctcccaggtttgtaaaatagtccattggtccaaggagccccccaggacttgggtcagtgccgtacactggttagagtgacatcatccagtgtagttgagtaacctgctaagataaatgtcattcccacacttgagaaaaaacacagaacattctgaatagaaaacaagacttaaaaggaacccctttaaagctgtttcattttctgatagccactttctcttagttttaatgatgctcttcatggtgctgtttgggctccgagggtcatgggtcataacaatgtttttccttcatctagtcattttaaagctttgcaaataatgagatttcattaggaaatcagaaagagaaaataaaagtttgtcatggttaccatgccaagtagtgtagaaaggaaatgaatattgccttaagttcacagcattgggatatttttgccttatagttacctggtaattgaagtgggagactggaaaactggaattctttagtaacctcgaaatctagtgttagctcaattttcaaccacttcctctgcaaaacttaaggaaaaactcttaagtacataatgtcccaatgtacattttccttgtctacaatctaataagtgatatcctgaactgtaggaatcatattttgaaaactggataaaatcatcagcatatccacaagttgacatttttgttaattatagatcggcattaactgtcaactttaagttctgttcaaattctgtgtgattgtaaactaatgtgttcaactgtcactgagaatatctattggtcttttgaaagggagtctatgcagttagtcctgagcttggcactagttatgaaaataggagatgaaggagaaatagtacagagtttgtttccagagatcttggttcacggtggttctgaattgaatacttccctcccccacgtcaccaccctggaaatccaggtatgaaaaatataagcaagcctcagagcagtgcaatataatgtggaggaaaaatcctaggacaagatgtcttaagtcctggattgcaataatggttctgccactaacttgtcatgtgaacttggataagtcgttcagtttctttccacatgttttcccctctctgaatcaaggatttagctactttacctactaccatcacagactgtcataagaaccacaaggagtataaaaggtatgcttcaaaatgtcactgtcctagtcttctcttcattgagaagagaaaatatttgactaaaaaaaattgactcttcacttgttcactgatttctgacaaaattgatagtccatagatgtttctacccagagaatggtggtttccaaagtatggtttgtattggtacagtcaggtgatttccaagggctgtgtccaagtagtattgacatatacgtattgacatataagactatgtctccaattacagtatggattctttgatggatcttctccaaagcatcactgctctcagaggcagtgggtgtggtagaaaatgcattagactaatagccaaaagactcgtgttctggtctcagatctgtcattaaataactgcatgaccttgaacaagtcatttaatttctctgggtctcagttttctatactgtaaaatgaattagatattcttaaatcttttctagttctgatatgctcttaatactacattttctaggttcacattcatttgacatttgaatgtaactgttaggttggttggttggtttgtttttccctccccctcttaatgctgagtgggactgaatggaataggtggttttgggaatcttttattatgtcaaagtggttcatgaactatgaaagctcaagggtcatggctattggcccccagaaaatcctgatatcctggtttttcagtcactggccaatgagttagacttatgaaaccaattcagcatactttggaccttgtgttttcttacagtaccctttagcagtgtcatctggctgtgttctgtagtgtagatgagccattttccaaacgttgacattttttggaccagaagtgagctggatcttttctctggctaaggctacagtggaggatggaggaaaaggggatggtctaatggtcttttaggaagtggcatgacgtgggctctgaacgtgaagtggaaggaacacaaaacattctgttgattaggaccaataaaaaaacatgggaaattgcttgggacatgatatttaacatttattaatttttgtgggaaccagtaaaatgttcccttggtgccctatcaaacagatcctttgttgaatctgtcactattctaaccctgtaatgatctgttcttaaattcatcacaggaagtttgtatgtgtgtgcaaccagttctaatttacctccttttttttttttcttttctttttttttttttttgagacggagtcttgctgtgtcacctgggctggagtgcagtggtgcaatcacggctcactgcaacctctgcctcctgggtttaagcaatcctccccctcagccttccaagtagctgggattacaggggtccaccaccat

SEQ ID NO: 95745 - DNA, 74636 bp, Homo sapiens
  misc_feature (1)...(74636): n = A,T,C or G
tgagttacttcacttagaataatgatctccaacaccatctaggttgtgcaaatgccattatttcattcttttttacagatgagtagtgttccatggtgtgtgtgtatatatatatttatatatatttatatttataatattaaaatataatatatttatatttaatatttttatattacatatgtatatttaccacattttctttatctactcattgattggcatttgggttggtcccatacttttacaattgtgaattgtgctgctatatacatacatgtgcaagtgtctttttcatattaagacttcttttcctctgggtggatacccagtaatggcattgctggatcaaataatagacctacttttagttctttaaggaatattcatactgtttttcataatggttggactagtttacattcccaccagcagtgtaaaattgttcccttttcacgacatctatgtcaacatatatatatattttaaattacagccattcttgtaggagtaaggtggtattgcactgtggttttgatttgcatttccctgataatagtgatgttgagcattttttcatatgtttgttgaccatttgcatatcttttttgagaattgtatattcatgtccttaactcattttttgatgggattatttttttttcttgctgatttgtttgagttccttgtagattctggatattagtcctttgtcagatgcatagcttgtgaagattttctcccactttgtagcttgtctgtttactctgttgattatttcttttgctgtgcagaagcttcttagtttaatgaaatcccatctatttatatttgtttttgttgtattatcttttgggttcttggtcatgaattatttgcctaagccaatgtctagaagggtatttctgatgttatcttctagaattttaatggttcatgtcttagatttaagtctttgatcctttttttttttttttttgagacagggtctctgtcacccagactggtgtgaagtggcgtgatcttggctcactgcaacctctgcctctgcgttcaagcaattctcccacctcagtctcctgagtagctgggaccacaggagtgcaccaccatgcccaggtaatttttgtattttttggtacagatggggttttgccatgttggttggtcttgaactcttgacctcaagtgatctgcccaccttggtcttccaaagtgctgggattacaggcatgagtgaccatgcctggccttttgatccaccttgagttcacttttgtataaagtgagaaatgaagatccagtttcattcttctacttgtggcttgccagtaatcccagaacaatttgttggacaaggcgtcctttccttactttacgtttttgtttgctttatctaggatcagttggctgtaagttggctttatttctgtgttgtctattctgttccattggtctgtgtacttatttctataccagtaccatgctgttttggtgagtatagtcttatagtatagtttgaagctgggtaatgtgatgcctccagatttgttctttttgcttagtcttactttggctgtgtgggcttttttttttttttttttttttttggttccgtatgaatttgaggattgttttttctagttctgtgaaaaatgatgatggtattttgaagggaattgcattgaatttgtagattgcttttggctgtgtggtccttttcacaatattgattctacccatccatgagcatgggatgtgtttccatttgtttgtgtcatctatgatactttcagcagtgttttgtagttttgcttgtagaagtctttcacctccttggttagatatattcttaagtattttatgtgtgtgtgtgtgtgtgtgcacagctattgtaaaagggattgagttcttgacttgattctcagcttagtcactattggtgtctaacaatgcttctgatatgtgcacattgattttgtatcctgaaactttactgaattcatttatcaaatctaggagctttttggatggatctttaggattttctagatgttcaatcatatcatcagtgaacagtgacagtttgacttcctttttaccaatttggatgccctttttctcttgtctgattgctctggctagtacttccagaactatgttgactagaagtggtgaaagtgggcatccttatcttgttccagttctcaggggaaatgctttcaacttttccttgttcagtataatgttgactgtgggcttgtcatagatggcttttattatcttgaggtatgtcccttctatgctgatttttctgaaggttttaatctttatgattcttgattttgtcaaacgagttttctgcatctgttgagatgatcatgtgatttttggttttgattctgtttatgtggtgtgtcacatctattgacttgtgtgtattaaaccatccctgcatcactggtatgaaatccacttggtcatggtagattatctttttgatgtgctgttggattcagttagctagtattttgttgaggatttttgcatctatgttcatcagggatattggttgtagtttttattattgttgtttttatgtcctttcctggttttgttattagggtgatactggctgcatagaatgatttatggaggattccctctttctccattatttggaatagtttcaattccaaaagatagagaaataccaattcttatttcaatgtctgatagaattcagctgtgactctatctggtcctggacctttttttgttggcattttattttatttaaaaaattttttatttccacaggttattgggtaacaggtagtgtttggttacatgagtaagttccttttttttttttttttttttttgagatggagtctcactctgtcgcccaggctggagtgcagtggcttgatctcggctcactgcaagctccacctcctgtgttcatgccattctcctgcctcagcctcccgattagctgggactacaggcgcccaccaccatgcccggctaattttttgtatttttagtagagacagggtttcaccgtgttagccaggatggtcttgattccctgaccttgtgatctgcccacctcagcctctcaaagtgctgggattacaggcgtgagtcatcacacccggccatgagtaagttctttagtggtgatttgtgagattttggtgcacccatcacctgagtagtatatactatacccagtttgtagtcttttattccccaccccttctcactcctttgccctgagtccccaaagtccactgtgtcattcttatgcatttgcatccttatagcttagctcccacttatgagtaaggacataaaatatttggttttccattcctgagttacttcacttagaataatagtctccaatctcatccaggttgctgtgaatgctaataactcattcctttttatagttgagtagtattccatcatatatatacataccagtttttttatacactcattgtttgatgggcatttgggttggttccacatttttgcaactgggaattgtgctgttataaacatgagtgtgcaagtatgttttttgtataatgacttcttttcctctggatagatatccagtagcgggattgctggatcaaatggtagttctacttttagttctttaaagaatctttacattgttttccatagtggttgtactagtttacatttccaccagcagtgtagaagtgttccctgttcaccatatgcatgccaccatctattattttttgatttttggattatggccattctttcaggagtaaggtggtatcacactctggttttgatttgcatttctctgatcattggtgatgctgagcattttttcatatgtttgttgaccatttgtatatcttcttttgagaattgtctattcatgtccttagcccactttttgatggggttgtttttttcttgctaatttgtttgagttcattgtagattctggatattagtcctttgtcagatgtatagattgtgaagattttctcccactttgtgggttacctgtttactctgctgactgctccttttgctgtgcaaaagctctttagtttaacgaagtcccatctatttatctttgtttttattgaatttgcttttgggtacttggtcatgaaatccttgcttaagctaatgtctagaagagttcttccaatgttatcttctagaatttttatagtttcaggtcttagatgtaagtccttgatccatcttgagttgatttttgtataaggtgactgatgaagatccagatttattctcctacatgtggcttgccaattatcccagcaccatttgttgaatagggtgtcctttccccattttatgtttttgtttgctttatcaaagatcagttgactgtaggtatttgggtttatttctgtgttttgaaaaaattaccatttttatctcgctgcttgttattggtttgttcagagtttctatttcttcctggtttaatctaggaggttgtatatgtccagaaatttttcagtctcctctcagttttctagttcatgcacataaaggtattcatagtagccttgaatgatcttttgtatgtctgtggtattggttataatatctcccattttgtttctaattgagcttacttggatcttctctcttcttttcttggtgaatcttgctaatggtctatcaatattgttcatcttttcaaagaacaagcttttgttttatttatcttttgtattttttgtttcaattttatttaattctgctctgttctttgttatttcttttcttccactgggtttgggttggtttgttcttgtttctctatttccttgagatgtgaccttaggtctatttgtgcccctttagactttttgatgtaggcatttaatgctacgaactttcctcttaacactgcttttgctgtatccctgagtttttgatagattgtgttactatcattcagttcaaggaatttttaaattttcatcttgatttcattgttgacccactgatcattcacgagcagattatttaattttcatatatttgcatggttttgagggtttcttttggaattgatttccaattttattccactgtggtctgacagtacttgatacaattttgattttcttaaatttgttgagacttgttttgtggcctatcatatggtctatcttgaagaatgttccatatgctgatgaatataatgtatattcctcagctgttgggtagaatgttctgtaaatatctgttggtccatttgttctagggtatagtttaagtccattgtttctttgttgactttctgtcttgatgacctgtctagtgctttcaatggaatactgaagtcccccactattattgtgttgctgtgtatctcatttcttaggtctagtagtaattgtttcataaatttgtgagctccagtgtcagatggatatgtatttaggattgtgatattttcctgttggattagtccttttatcattatataatgtccctctttttcctttaaactattgttgctttaaagcctgttttgtctgtgttaggttttaagtgcaggctttatgtccagcataagacctaaagaggcaggagaccagcttaatgtcagtgcccgcccctgcttacaggctggggccatctgtaggcttggacaggaggggtttggggagacatggcctgctgtctgggaaaatattgataacatgttcccaggatgaggcatttctgacccttgttgtggtggaacgtggtgttccttgtactttctcccagcagaatatgataagaggcaggctatttctcatggcctgaatccctgtggaatatttcactttaagcacggtctgtgaaatggcgggggacttacaaaatggtgcagattggactttcttgccttctactttaatataaaaggaagaggggcgttgttgattatctggctgtttcctgtcgaattaggggcactgtaaccagggtttgggttttgaagtagtgggtgttcgactttagagttgttttcctggaagcgctgatactggacttagtggaggagaacgacggtatcaatgtgtttctggatgactgcctggacaagggagttcagcttttgggagactgactgggctatgaaggtgagtatatatgggccaattgttagctaagaggaggaagattaagggccctgagaaagaggtaacctgctatcacggttctgagtgcagcagggatgtttagtctgaaacaagaaaggttccctcataccccttgcagggtgtgcgatggggttgcagctgcttcttcagtgccctgctgctcaaacctctaggggagcatacagatgggcaggctgtggggctctgaccccacgacagtgtctagggatgagtgtttacagctgaggccccagtgggcgtgtgttagtgtgctcttttagtttaggcatttataggcgacttgtgttaaccagctcaattagactctttaccttgttgcaaggacagagggctttctgtatcctgtgatccttggatcacacatgggcttggaaaatgaatgcaaggttttactgagtggaagtagctctcagcagatgtggaaaccagaagggagatggttttcccctggttcaggccgcttggcaccctgcgctctcctctgactgcccccaccaaactccatgtagttctgctgttttggtggcctgccagcatgctattgcctgttggtgcattcctctcaacgtccagccaccystgtgttcctcccctgatacgttcctccgctgacatgttcctccgctgacatgttcctccgctgatatgttcctccgctgatatgctcctctcaaggtccagctgcctgtgtgttcttccrctgatctgctcctcttgacgtgcagccgctgtgtgtctgcctgctagcgtcccgggtttttataggcacaagatgggggcatggcaggcgagggtggtcttgggaaatgcaacatttgggcagcaaatgcctgtcctcacctagctttatgggagtggagccctaccggggaccatgccttcctctacccagcacgtcccttctccccttccatatcatttaaagggaccacactcttcccttcccagcacttacgtatcagtcctgcgaacaggggatgatgtgtatagttagtctggtgtgtgcggaggaggaggaaatagagattaggaaaggaacctgaatagtttggttgttaggcaaaatgttaatgtctggagattgaaacaccagtgtgtatgttcctgaccaacttgcctgcaggcaaagataagagtttgtgctacacagaaagaaaacaataggggtgggcagacaaaagttgtaggttatggtggcaagccatgagaaggtgggggttgaatcctggataaagtttttgttccaactttttgtttttccaagttgaatagttgttgaagggggccagcccctccacacttgtggctatttctcgtcrggtgggatgagagactgagaaaagaaataagacacagagaaaaagtatagagagagaagagtggacccaggggaccagcgcttagcatacgaaggaccagcgctggcactggtctctgagttccctcagtatttattgatcactatctctactatctcggtgagggggatgtggcaggactatagggtaatggtggagagagggtcagcagggaaacatgtgagcaaaggtctctgtgtcataaataaggttaaggaaaggagctgtgccttgatgtgagagtaggccagatttatgtttgactttacacaagcatctcagtgcggtaaagagcagtattgccaccagcatgtctcacctccagccataaggcggttttctyctatctcagtaaatataatgtatgatcgagttttacaccgagacattccattcccagggatgagcaggagacagatgccttcctcttatctcaattgcaaagaggccttcctctttcactaatcctcctcagcacaggccctttatgggtgccgggctgggggatggtcaggtctttcccttcccatgaggccatagctcaggctgtctcagtggggagaatccttggacaatacccaggctttcttgggcagaggtccctgcggccttctgcagtgcactgtgtccctgggtactcgaaactagagaatggtgatgacttttaccaagcatactgcctgcaaacacatttttaacaaaggacatcctgcacagccctaaatccattaaacctggagtcaacacagcacatgtttctgtgagcacagggttggggctaaagttacagattaacagcatctcaaggcagaataatttttcttagtagaaaacaaaatggagtttcttatgtcttctttctacatagacacagtaacagtctgatctctctttctttccctgacagttgttagtaagggtatcccctgtgaagscttgttggtcagggaggagatgaaggctgtttggttttggagagacagagagagggagagagagaaatgggtttttgtaattaatagccattgtggttctgatagggctgaaggatataggttgcagtcgagagaatggattggccgactaggtgagatgtaggtttattttggaccgggttcrtgtggttagattaacaggaagggctgtgaacagctggatttgtgtggacaaacaaatctaacagttggaaaaaagaggggakcgtgactgatttaagaggtaatgtatgaagttgacaaagggggccctactgccagaggctgggggtggagacttagagtatctcacaaagaagacaaaaggagatttgagtgggagwgaaattttggaagataccctgcagccatagctcctggattagtgtaggaaataggagtggtctatccagggatgtggggaaggaataacaggaaagatctgaaacaatgtaccagataaaagatttgaaattggaggaagagagtgttatggaccagggcctcctggattggcaacttctggaatttttgttaagtgccgctaggttagtcctgtaagaaaggaagaattttggggtggggggtgtggggagggaatttctggatgtaaattggtgctctttttagtttggaatggtgtatcccgtgtagaaaggatgttagctttcccgatgtgggagtaattagaataacctggtgagcacccatccacttagattggagaagggaggaggagaagtctgtgatccagacccagtccacttgttgtagggacagggaggtgtgttttgatgatggacctttaggctggggcaagtaagtgtttgtgtactgtcttattagatgttgagtgaggtgtcatgcaggccaactacccggtatagaagggggaggagaaacagggagattctggaggataaaggggcattgtacatgagtttaaataggcttaggctgaggggattttagggcatggctcataaacccatgagggccaatgggagaagtgaagttcaggccatcttaacctctagggactgtttggttacttgttgttttaaaagggcaatggcctgcttaattttacctgaagattggtggtgataaggaatatggaatgcccatttaatgtttagagtcttcgctagctattggttaacctgtgaaacaaatgctcgcctgttgtctgactggatagaagaggggagtccaaatgggaggataatgcgggtaatacagagaatagaagtgacagtgtgtgtgtggtttttttttttttgatggtggtaggaaaagtttctgtccatccagagaatgtatctattattgtcagaaggtactggatttgttttacagggggtcatgtgagtgaagttgatttgccagtcagtcttgccctggcaggtgtcttcaggcctggtgtgtggggaaaggaggtggtttgatagctccctgaggggaagtttgagtgcaaagggaacatgccttagtaatatctttgagattggcagtcatggcaggagaatgtgtataagagttggcatagggggcggtaaccagtatgaaaatggttgtgtacatatgaaagtacagaaggtcctggaacttgggcaagacaattttattactgaggtaaaaccatcctccttcctgaatggcatcagcctggatgagtgaggtttgttcttcctgggtatatacaggatgtatgttgggaaaaatgggcagtaatgatggggttttaaggggtgcctgccaggctgctgaatttgctaagaagttttcattggttttggcatttgtagccttttggtgttccttgcaatagataatggtggcctttagtggtggttcagccacctccagcagtttgtgtatgagtttgccatttcctatggggattccttttgtagttagaaaaccccttttctgccagattaagacctgagaatgtaggatatggtatgcatatttggaattggtgtaaattggttaaccctttcctttttccttttgctaggatgggcaactagctcctcttgttgacaggtagttctgcctgttgagaggtagtatggggctggagagcattggattctaggagtttgtttttggcaatgatgacatagccagctgctggacatggctccctaaaagagcttccgttaatgaaccacgtaggtgttccctgcaaaagggcttgcaaaatgtgttggaagtgggaggagagggagtctaagaggtccaggcaggagtgagagagctcatgtgtttacagggaggagggtggccaggttaagagctttaatctctggagggtgactagagggttacctatgaataagacatatacctgctataagcaagatgacaggagggatagaagggattgatggcttatgaggtcctgtaggttatgggaagatgcaattgtaatgtgttggttagagagtgagtttctgtgcctctggggccagcaatgtggccacacccaatatttttaggcagagttgccagccttggatgacagagtccagttgttttgagaggtatgcaatagtttgtggggtgttgctgtatgtttggcagagtagtccaagagcaaggccttggttagaatgtacatacagagtaaagggcttggtggggttgggcagtcccagtgctggggtcattaaaagggcattttttttttaaagtttttaaagtggtagttgatggggcaagctgagttcaggggttctaggatgggccttatgagatacttccggctgtgaattcatgtagaggagcttggccagcaagctaaagtcgggaattcacagtcggaagtatcccacaaggcccaagaaggagaggaagcccttctttatgaagggaagggacatgtcccttattagctcctttggttgatttgggacggccaaagaattaggggttagaacaatcccaaggtaagtgacctgggtttgggctacctgagcctttgtgggtgagacctgatatcctcaactatagaggaattttaaaagctgagtggtgtgttggatggacaggtyaaaggaggggctacagagaaggaggttattgatgtattggaggagggtgttaggagcaaggggaagttcagctaggtccttggtgaaggcctgttcgaataggagggggctattctggaacccctgtggaagtccatattagttgggtggatgtgtgagtatcaggatctgaccaagtgaaagtagaaagactttgggaagccagatccargggaatagtaaaaaaggcattctttggatccaatacagaaaagtgtgtggtagataggggaatatgggagactagagtatgtgggttggggaccactggatggattggaaccactgcctggttgttaactcaaagatcttggaccaagaagtaagacccatctggtttttttgacagccaggataggagtgttgtggggagaattgacaggcttgagaacttgagcttgtaaaagtttacagatagtaggtttgaggcccctgaggctggctgggttaaggggatattgagactgatgaagggaaatggaggggttttggagagttattttgactgggatgtgatgtttggctattgtgagtctagaaacgttccaaacttcaggatcaacagaaagtaacaaggtagatagtgaggaaaggctggagcagcaaacattctgagtgcatcccctaagaaggcaggccatggtcacctggtgactgggaagacctctcacccagcgctgggattttctggtgaattggaagaaatagggatctggaaaggaggaaaaaggagagtcacccactaattggagacaggtgttggatgtgatgagaatgagggaagggggctgggaacagggagtccactcaggatctggaagcaggtctggttctagttttttctgcttgctgctttccagattgtaagagaagacttacccatttagaacccaatccccattccaggttttggcacccaaaatgttagattttgaagcgaaggcaagggttaaagaaaggtacagaaagagagggagagagggcagcttaacagcaaatccaggctttatgtccagcataagacctatagagatgggagaccaacttaatccaagttcccaccactacttacaggctggggcaattgataggcctgggtgggaggggagttgcggggcatggcctgctgcctgggaaaatgttgataacgtgttcccaggatgagagttttggcccttttccggcagaatgtggtgttccttgcattttctcccagcagaatataagagacaggctatttctcacagcctgaacctctttggaatgtttcactttgacgaaggtctgcaaaatagtgggcatcttacaaaatggtgcagtttgggctaacaatctgatataagaatagctattcctgcttgcttttggtgtccatcttcatggaatatctttttccacccctataccttaagtttaagtgagtccttatgtgttagatgagtttcttgaagacagcagatacttgattggtgaattcttatctattccaccattctgtatcttttaagtagagcatataggtcatttaaacattcaatgtgagtattgaaatgtgaggtattattcagtttgttgtgctagatgttgcctgaacaccttgtttttattttgtttttttatttcattgtgttactgttttataggtcctgtgggatttatgctttaagaaggttctattttggtgtatttcaaggttttgtttgaagatttagaactcctctttagtagttcttgtagtgctggcttggtaatggcaaattctctcagcatttgtttgtctgaaaaggactttatctttctttcatttctgaagcttagttttgctagatacragattcttggttgataattgttttgtttaaagagactaaagatacaaccccaatcccttctagcttgtagggtttctgctgagaaatctgctgttaatctgataggttttcctttataggttacctgatacctttgcttcacagctcttaagattatttcctttgtcttgattttagataacctgataattatatgtctaggtgatgatctttttgtgatgaatttcctgggtgttctttgagctttttgtatgtggaagtctagatctctagcaaggccagaaaaattttcctcaattgtttcctcaaataagttttccaaacttttagatttcttctttgggaacaccaattattcattcttaggtttggtcatttaacataatttcaaactttttggaggctttgttcattttttaaaaattcttttttcttttctctttgtcagattgggttaattagaaagccttgttttcaagctctgaaaatatttcttctattgctttcttctattgttgaaactttcaagtgtattttgcatttctgtaagtgtgtcttttatttcctgaagttgcaattgtttttttatttatgctttctatttctctagagacttctttgtccatatcctgtattattttttaaatttctttcttttttttgtttgagacagagtttgctcttgttgcccaggctggagttcaatggcatgatctcgactcactgcaacctctgcctcctgggttcaagtgattttcctgcctcagcctctggagtagctgggattacaggcctgtgccaccacacctggcyaattttgtatttttagtagagacagggtttctccatgttggtcacgctggtctcgaactcccgacctcagctgacctgcccacctcagcctcccaaactgctgggattacaggcacgagccaccacacctggccttttaaaaatttctttaagttggttttcacctttctctggtgcctccttgagtagctgaataattgaccttctgaattctttctctggcaattcagagatttcttcttggtttggatttattggtggtgagctagtgtgatcttatgggggtgttaaagaaccttgctctgtcatattaccagaattgattttctcrttccttctcatttggggtagactatgtcagaggaaagatctggggttcaagcgttgctgttcagattcttttgttccatggggtgatcccttgatgtggtgctctcccccttcctttagggatggggcttcctgacagcgggactacagtgatcattattgttcttctgggtctagccatccagcagagctcctgggctgtgggctggtactggggaacgccttcaaagagtcctgtgatgtgatccatcttcaggtctctcagccatgaataccagcacctgcttcagtggagatagcaaggaagtgaagaggactctgtgagggtccttggttgtagttttatttggtgtgctggttttcttgaatgctggttgtgctagcagtgaaattgtcacatggacagactcaggacctctagttggccaggatgttacaggcagtggaattagctgttattttctcctttcttggagcagggttgttctgttatgagttgctataatggcttgcattggctggcctccagctaggggctggtgctttcaagagaccatcagctgtggtagtatgggggaatacaagtttgccctaaggttgcctaagtaagtattcaggtttttcaggcaatgggcgggatcatagagctcccaagagattatgttttttgtctttggctaccagggctggtagagatggaccatcwggtgggagcagggttaggcatgtctgagctcagactctccttgggtggggcttgctgcaatggctgtgggggatagggatgtggttctcaggccaatgacattaggttcccagggggattatgcatgcttttgctgtgtcatgcaggtcaccagggaagtagggggaagctggcagtgacaggcttcacccagttcccatgcagccagcaagactagtctcattcccactgtgctccaccaccagcactgagttcatatccaggcagctggtgagtagggctgagattttgccccaggttacaagcctccctgttgagaaagcaagcagggcttttaggccctgcccttccctgactgcggtggattctgtggtcatatctgcacatcctgttccctgccaccaccaccccccaaaaaaaatctgcccaggaaagttcacagctagtcaaaattattataagatttaactggaagtttccttctccctgtgatctttccccaattacactagcagccctccccaaggacccctgtgagacaacgtcagaaatggctttcctggggatcaggaatgcccacaggactcttcctgctgcttcttctactttatattttgctctgctctctaaattcatttcagctctaggtaaggttaaatccttctgtaatcccagcactttgagaggccaaggcaggaggattgcttgagtccaggagtttgagataacaacataacaagaccccatctctacaagaaataaattaactgggcatggtggtaaatgcctgtagtccctgatgctcaggagactgagggaggaggatcacttgtgcccaggagtttgaagttgcagtagactatgattggacactgcactctggcatgggtgacagattgagaccctgtctcaaaaaaagaaaaaaaggataagtaataatagtgggcaactaagtggcctagactgtagaagttttggcagtaacagcagtcctgtggttgttgatgtcctcagcgtcaagggcttttggagtcctcctattctcattttccccacaatgggggtaacagctgagggtattcctcttggcatcagatctgacattgtctacactcagttgtggtggtgtgggttccaggtgtaggtgcttggagaggctgtgggactgggttcctaagctcagttagggtcttgtgaacctattgtggcacctgagtctcgagttacaggttcactgtctgtggatgtaggttgtccatcgagcaagaatctgtgactgaggcattccccagcatcttgtgaccggaggcctgaattgtagctgtgattttgctccagaggagagggcttctctgagaaattcctcaatgaaattgtttatcttataatgagggtcaactatggccaaagcatggacattaatgtcttttggagggcagaatcactgattctagcctctgagcagtggaaggtgtcaataaacttgtttcctcagggtttcttcaagcttccaaaagcaatgttatatctggcccagtaatgttcatagaggacaaaacaaggattaaatagacaggaattacacttggagaactattccacaattcagctctacattgttgcaaagaatcaatgtcagtaaaactttacaaattgctgctgaggaatggaataattaaaaaatactggatttaacaccaactctccttattgcaatttacttagtctgattctactagctcttcttttgttgtaaacatttcctataaataggaaatatcatttgagaaagtgaggggaagtggaragagagagagagagagaagccattttttgtgtgccatgtcttataagaactttacatactgactgtgtatctgtgtatattccattctgtacagtttttaggtagttcaagaattgcaggcttttaatcagatcacaaaaagaatagaccttcagcattagctyggtcaggtttcttaaacttaggtttataatgtaaccgtctgtaatatatctctcatttgaccctgtgggccataaaataaaatttataaactagatattgtggaatgcattctcaccaccaaactattcacaaagaaccacaatggactggtatgggttttgttttgagtcttctttctactcttgtattcaaaatattctgcccttaaagattttgttcaaaatagacaagaatatcattaaacaaacaaacacacaaacaaaaaactgtccttcctacactgttcaatgtgttcctttgttatttagaaagtttattttgctttactataccctttgctatagtatagtaaagctatactatatgtcctttgctatacccaggcactgtaatctttcacctggtttctttaacttttgtgaaggtatttttgtacagatagttgttcaagatgatgcaaagggataagcaatggagagtcttattcagccatcttacttatgtgcatctcctcatcattttgcttttgtttttgttttagcacatcctactttctgacaccacaaaatgccccaaatttatcttctgtctttcaaagccctggaattagccacttgttttctgagatgtcatggttcttttctttttcctttttctcaaaatgacatttagaaacaaatatctgggaactaagagtgctcattgctagtgggatgtcattgcttcaaagctgacaaatacacacacacacacacacacacacaaacactcacactcatttactcaaatgatgaattcatactgataactccaattccaatccaagatatcaacaagtattttgtaaaaggaaaataaatcttgaggccccaaaatcactaagctaaagggaaaagttaagatgggaactgctcagggcaaacttgcctcccattctattcagagtcacccatctgctcactgagataaatgtgtatctgattgcatcctttggagaggctaatcagaaactcaaaggaatacaacgatttgtctcttatctacctaagacctggaagccccctacccgcttcaagttgtcctgcctttctggaccgagccagtgttcatcttacatgtgttgattgatgtctcatgtttccctaaaatgtataaaaacaaactgtgctctgactaccttgggcacatatcatcagtacctcctgaggctgtgtcatgggtgtgtgtcctcaaccttggcaaaataaactttctaaattaactgaaacctgtctcagatattcagcatttacattttggcaaccacaaagggattctgagtggaggtacccctgatctttgaygaatctcctataggtgcttggtatcagcataagctaagtttatggcccaaatcaatagaacaatttgctgaggtctgggagcaccccctccagagtgtcacctgtgtctgtgtgaagagaccaccaaacagactttgtgtgagaaataaagctttttaatcacctagctgcagacaggctgagtctgaaaagagagtaaagggagataggggtggggcagttttataggatttggataggtagtggaaaatctattttaagtattttagtttcctgactgtgggcatgtgagtaaagtcaatttgccaatcctgggcaggggcaaatctctgagcttgatgtctagggaagggagggggcctgaacaatccctggggagtagtagactagcagatagaacactgagaagtgatttccttgaggatagatttccatgatggaaaggaaatgagaggttctaagagacaggctagtggcttataacctacatggaagaggttatgaaatgatgacagaatagaatgagcctgtgaggctggaaggagatattttccttggtctaagaaccatttgccttgtatgggaagagatcgattggtggaagtttcagtgggggagtaggtgggagtgaccaaagagaaggagaaaaactggcagtgagggacagaagttggaacgctaggtgcttctttagctaccttatcagcataagcatyggcctgagcaatgggatctgatgtcttttgatggcccttgcagtgaatgactccagcttcctttggaagtaaagcagccttgagaagagtttttattaaagaggcattaatgatagaggatccttgcgtagtgaggaaacctctttcagcccatataacagcatggtggtgtaggatataggaggcatatttagagtcagtatgaatattgacgtgtagtccttttgcaagagtgagggcctgagttaaggcaatgagtttggcttgctgagaggtagtggatggggacagaatggtagcctcaatgatagatgtgaaagatactatagcataacctgcctatgctggtgagtggagattaggcctggtggaactgccattagtaaaccaagtgtgatcagggtgaggaacaggaaagaaggaaatatggggaaatggagtgaatgtcaggtggatcagagagatacagccgtgggggtcaggtgtggtattaggaataatgtgggggccagcctaaaacagtaatgtcaagttgtttggacagaaaggctacagggtgcggtcccagctcttgtgtaggaattttgaccgcacagccctgcactttgtctgtgtgtaatgaaaagcgttgggatgagttagggagatctagggtgggagcagattttagggctgtttttaaggaatggaaagaagaatggtgaaaggatttaggatctatggggtcagctaggtttactttgtgagtttatrtaatggtttagtcaggttggcaaaaccaggtatccaaaggtgaaagtacctgaccatgcctaggaaggaaagcagctgttactttgtagaaggggttggggtttgggagattagccggacatgatcagcagggagascacgtgtgtttttattaagaattatgctgagataggtaatggatgaggaagaaatttgggctttggagggagatacgcaatattcttttgagaatagatgttggaggagcaggagggtgtcctgttgggaagatttgtaggaggggctataaagtagaaggttgtcaaaatattcaataaggtgagaagcagayggacggaaagaaagtaaatcatgagaaagggcttgactgaagtaatgggggctgttcctgaagccttgcagcaatacagcctaggtatgttgttgagactgatgggtgtcagggtcagtccaagtaaaagcaaagaggggctgggatgaggggtgtaggggaataatggaaaaagcacctttaagatcaagaatggaatagtgagttgtggagggaggtattgaggacaaaagagtgtaccggttgggcaccacagggtggataggcaaaacaatttggttgataaggtggagatcctgaacttacccrtaggacttgtccagtttttggacaggtaaaatgggggaattgtaaagagagtttataggctttaggaggccatgctgtaacaggcaattgataacaggatttaatccttttaaagcctgctgtgggatggaatattggcattgagtggggtaagggtgattaggttttaatgggttagtaatgggtgtgtgattggttgccagggagggagtagaggtgtcccatatctgtgggttaaggtagtgggatatgagaggaagatgcaaaggaggctttgggttgggaagaagggtggcaatgagctgtggctgtagtccaggaatagtcagggaagcagataatttggttaaaatgtctcagcctaataagggaacagggcaggtagggataactaaaaaagagtgcataaaagaatgttgtccaagttggcacaagagtgggggagttttaagggattttgaagcttggccgtcaatacccacaacagttatgggggcaagggaaacagccccttgaaaagaaggtaatgtggagagggtagcccccatatcaattaagcaggggacggacttaccctccactgtgagagttacctgaagctaggcatgcgtgatggtccagggggcttccgaggtgattgggcagtgtaagtcttcagccactaagctgagcagatctgggaaggagtcagtcagtcagagaactttgggccagagctttaggggctctaggagtggctgctgggtgagctgggcagtctgatttccagtgggtccctgcacagatgggacactgcttgggaggaatcctgggctgtgagcattccttggcccagtggccagatttctggcccttgaagcaagatcctgatggaggaggtcctgtaggaatgcttgaccactgcagcttaggcatgtgtggcttagggattttgaagttcttgtgtgctggaggtatggctgggttttttctcacagcagaggcaagtaattgtaactcagaaatgcattactgtctagctgcctcctctctattattgtacaccttgaaggcaaggatgattaattcctgtygtggggggggtttgaggtctggattctaatttttgaagttgtatttaatgtctggagcagattaggtaataaaatgcatgttgagaataagacagccttctggtccctctgggtccaaggctgtaaagcgtctaagggttgttgccaaacaagccatggactgggttgggtttttatatttgatgaaaaagagcctaaatgctaactgatttgggagaggttggataaagaaaaaggagcattaaccttgactatgcctttagctccagccacctctttaagaggaaattgttgggcaggtgggggagggctagtcacggaatgaaactgtaagccagactgggtgtgaggaggggaggtgatagaaggattataggatggaggagyggaggctgaggaagaattggagcctgattcagcctggcagggtgcratctgaggtggagcagtctagggaggaggggagaggtcagatgggtcggtagaaaaggaagatagaaaagacttagcagcgtttggggttgggactgaggggacagaggggagggaaaggaggatttgggatgggtcrcattgggaacagagactagggtgggactgatgtgtaaaagaatgcctggatatcaggcatctcagaccatgtgcccattttacgacaagaattatctagatcttgtaggatggagaaattgaaagtgccattttctggttatttggaaccattgttgagtttgtattggggtcaagcagtattgcagaagaaaataaggcatttaggttttaggtcaggtgtgagttgaagaggttttaagtgcttgagaacacaggataagggagaaacaggaggaatggagggtggaaagttgcccatagtgaaggaggcaagccagagaaaagagagggtagagacacggagagaagtggttkgtggtggtacttgcccccctggggaggtggtgcttgctaccaaggtgaaagatcaaggcaagcatccctgcggtgatcagacacctctgaaatgtgggtgaataatcaggcaggcgtcaccacagtgattaaacatgaagggaagactgtcttcccaagttcgtgactggcactggagttttgggttcatggataaaacatatctcctctgtctctaccagaaaaggaaaggaactgaaattaagagaagggagagattgaagggtggcaccaaaattgaaaggagaaagaggttgagggatagtgacagaggttggagaagagagtaaaaagaggctgcttacccgatttaaaatgtgagaagttccttgggctggttggtctgaggacccaaggtcataggtggatctttctcatggagcaaacagcaggaggacaggggattgatctcccagtggaggctcccctatccaagtctgagcactaaatgtcatgcgtgtccatgtgcaggctgcacccagatgaaataaacagctttattgctcacacaaagcctgtctgatggtttcttcacacggatgcgtgtgacacagagaatctctgatctcccaaaatttggtggagatctaaagtttattttgctgtacaactctacccaccccatcctttttttttgagttttacttgcttccaacaaggaaagcaagatttcctgtttccatgatgttggaaggcaggtaactcctttatggaatttgagctcactcccarcaggcaggatgagtttgagtttcttcctgcttctaggatggtagaggacagtcttcagcctgagacccatccctaggtaagtagctgaatttgggttttgtcttatctaaagtctaacaaccagcttgtcttaatttctttttaccattagagtgctcagcgatcatattgttggttttttgttgttgttgtttcttccagtcttttgccaatcagatttgaccaactctacctgacttggttaaatccaagtgagaattccaaattatgggtaacaaagcctctctaatttggttaaaattccttgcaactgcaaaagaggaaaaaacaaacaaacaaaaatccccaaaaccatgtgcttggtttctgtgtttacttcctatcttaaaaaaagttcttttactttttttccaccctatatctccttccctctcttgccatctgcagcatcaaaaatctagaaaaggcttttaatgacttgaacccctttaaataattcagaacaaaggcaccaatcaccccttttgggatgttcttctttctttgtgraatttcgagagtcatgggcagattcttcttaggtctaaagctctgttttcctgtattgaatgagctgacctttttggctttgggggtaccagagattactttgtactgtgagaggatttgaccttggcatgtgttatggcaaatgggagctacaaagtaggggtggctgagtacagtttacagaaagtggtcttggctgttgtttcttattttctcctaggaagttgttgtttaaggatcctaattctagtttggagatacattctaaagggtcttctctatttactttttctcccaaaattaatcttgaatgagcttgtctgtgtgcatttgtgtgagaaactgttgttttcataggtaaatgagagactgagttttctcagctctgaagagaaaggtcattttgctcctcccagccaaaaggtgcccctgagtaaccaggggccttgtgggagtgtctgggggtttaaccccctgtgatttgcagcagccctgcagggaaatcctcaacaacaattaatttgaaagaatraggctcatccaggaaactcatatamgggctgattgcccagcgttttgagccctctctgaagtcctagacctctggagagagaaactgagacatgtaagagggtggaaacaactcagtggtgacacactgtggagtcctgcccacaagcaagcacacattgatccaccacacaaaaaccctaagccacagctcagttcctccttttaggaaaaaaaaaaaaagtgggaaacaaatgatgtaagaatgaggagaaaacaaagagaatgactcctctgtgagcactctgtaggttttatggcatctctacttgccagagtttatgtaaaatgraagtagtatggtctttgtgcacatttacattgagaaaaagagccctaaggtcaacctgcaaagtatagagttcataagttctctttttttctctattttattttctgcctgctttaaatctgctgttatttttctattaagataaaaaccactgtttggatccaacaggtgttttgtttgcaagctggtgaatttgtgtttatctcatggctaaagttctgaagtaaaagctataggatctttgtgtgtgtgtgtgtgtgtgtgtgtgtgtgtatgtgtatatatttaaaaggcatttataatttctataatttgatgtttaattggcaattcaatccattttaattttcctgtaacatgctagactttttctctctgtacctaatgatgtaaattttactatttgattttcacctgatttgtttcctttgatatgcaaatttaagatgacttagctgacaactgcctagggttaccaataatttatacaggttattgaaacaggttttcaagaattttaaagtctgagagggaaaaaagaggtttttatgactctataagatgtacttctattggcatgcctaacacatctatctatttatgtgttgtgtacacaatgtttcactactgaaaatatataaaagctctaattaattggcttaagaaaataaaagctcttgaatcaaatagtttatcaggaaaaaagaaaagagtagtcaaatgctttttcaagtttaataacttaagtaaaatctttaataaataagatagccttaaaattgttggtaaagtataataatattagaaatgtcttaagaatttccagcatacatttttgtttgtgcttatgaatcaagaaattttatacatatccctaccaaatactataaggcatcaaaatttggaataggggttacaaaactctaaaccaagccccaatcagaatgatctttgcttgtgtaatttctaataaataagacattgatatttgtttaatgaaactagctacatcttgaatttagtaagattaccataacttctaatcttgtggctttaggcagtctagtccacagacartaaggtttgttttgggaaaggactgttatcatctttatttcaaagctaaactataaactaagttcctccaaaagttagtttggcctatgcccaggtatgaacaagaacagcttggaggtttaaaagcaagatagagtcagttaggtcagatcttcttcactgggtctgttataattttgcagtggtggttccataagtttaaatgatgactatgacagttttcataaacaatctaggcaaatgattaaaataaaataattaggtaagtgtaatggactgaatacttgtagacaaatgtcacaatttagaatctaaagttatattaaattaagtaatagatatttcattatttgggtattttccaataaaaatatattcgtaggaagacattctttctaaaaaagttgtgttctttttaaaaatgttgaacaatttttgtcgaattcaaagcttatttaaaggttatatataaaacaaagtaaaaggaacaaggaaataagagaggtttaaggaaagttataaaaataaagagggttttttctggtaagaaagcttaaagatacataattttatatgagaaagaatcttgtatggtaaatttagtcctagaataaaatgactggttatttaagaaagagggatgttcaggacaaaccagaaagtccaggcatatcatgaatggtctgtgtaagtcacaataagaggatttattttaaaaagcttttacacgatcaagttgtctataattaaaggaacattataatctttctagagactgagcttgatgtaaaaaactcatacactaaataattggttagaacaatgaaattttcttaaggaattgatttattcttaataaattataagagcttttaattttttttaaccctgatatgatttggctctgtgtccccacccaaatctcaccttgaattgtagtgatccccacatatcatgggaaggacacagtgggaggttattgaatcatgagggtgggtttttcccttgctgttctyatgatagtgaataagactcacaaaacctgatggttttataaaggggagttcccctgcacatgttatgtgctcttgcctgctgccatgtccctttgctcttccttggtcttctgccatgattgtgaggcctccccagccatatggaactgtgagtccattaaacctctttcctttataaattacccagtctcaggtatgtctttattgccagcatgagaacagatgaatacaaacccaaagttcaacttttattacatctcaccatttttggttttctctctccttttaaagggtgtgaaatagtaacgctctccttcaacttattttcagctcacataagttttttcctcaagttttatttgttgtggcctaatgctaacaatgttttcttaaaggtctaaacgaaatgttttcttccaacataatatcctgtgaagtgcagaaggtcttttcttttgccttttggtaactggcctaatagattttaaggtttattgaaacaattcctatgtattattattaakttttggtttgcttaggaaaaggcagataaaattttttaaaattaaggttattatattcatgtatctttctgtatgtgcttttaagtatttgtgacattgagttacagggctttgactcctgggtctaaaaaggacaccaagtcctgctagatcttaaacamtgtcagtaattaaagcctcatcttcaggcccagtagaagatgccaatcaaaataaactgcattcttagacacagggctagaaattaaagctaatcaactcctcaaggcccagagactatcatggaagaggtgggcatgtgagattgtaagggccaattttgagagataaaataagttcagtttctctataagttaatcattaatgtcaaaggcacactgatgcaagaccagcatatgggaccctgtgtcagactaacaagatcttcttgaagcattaaccaactttttaataaaggttataaaaggcttatggaaattttatggtcaagattaaaactttatagattgtaaaattttgaaaaacaaatttaattggcttcatgctgttttattagggtttatagtttggaaaatgaagtctcctttctcaaataataaaggtttttgactttttttkgggaaatacttgagttatcactttggttaaatgaatgacttattttacaatgacttctgatatcaagtgttttaaagctttgatattttacaaactttccaaaatcaaattataaattctgtctttttctgacctaattaattctttaagatattagattccctgaagtccaaaaatgacataattttgcttatttgtataaaaattatacaggaaatattgttaaatatgaaattgtgtttggttttctttgggttatgtttatataaatatgttattggtatgtgttccgaaatcatgggaaacttctataattctgattgacttagtgtatattatctatagtaattatgttatgttaattagttatgatcatttaaaatagttatgttaaattattgtgtgccacagaggtaatamattcccttgtcaattgtgtctttgactatggctgccctgaaactttttgtcatccacagacaattgtcttgtttaggtcctctttagaagatgctattataatcagttatgaaactctaacaggtgctcttaaatacaagtttctgataactttggatattgtgacatcagaatagaagaaaaactgtcatgactcatggagaactgaaatgttcatgaatatgaagcagaacaggaattaactacacagactgaactaatagaagactgaagtaatctttttgactttttgcttaaaatgttgctgatcctttgttttttcagagtcaaggacaattttcttttgagctattaacagcttttaacaatttagtatactcctatggaacaaaatttagaacatatttgtttatctccacctgatttctccagaatttggaaactatttgtgggtattcataacttatggcaatacagttaattgcataagtgcagtaagaatctgttttcatttataataggacacaattggagaaactggttattttgccaaggctttgactggaatggcatgctttcctttaaggaatcaaacttgagttatggagccaataaaagccccttgggaaaactggcctcatacctagtctatacagtccctgtacagggttcctgacctgaggtaagtaaagaatgacagtttctgacaggcccaggarccccaagtttatcttggaacctcaaggggagaggaattcacccaattcaagtatttgatggtaaaaatctatggctgggcttggctttaacaaagttttatctgagattccttctatggaacaaagttccatcaaagccaatttaaaagcctatgtaaaaaataattattcttgctgctgcactgtgtacaaataatcagtccaagtataataaagcaaatcagtcctaccatgatttttctttattaaaaatgggaaactgccgagatcgcgccactgcactccagcctgggcgacagagcgagactccatctcaaaaaaaaaaaaaaaaaaaatgggaaactggagaatgaaaaattatgtttcaaaaaatatagtacacctgtttttaccttggattgaattataatttttcttggctacaagtctttcaaataatgttttccatttttttccttctttattcctccatttttcctaatttggagtcactgaaaactaagctgtgcttttgtaaagctctgtgaactgaagatggacaattcaaacttcagaagaaaataacagcaacctatttacatacataagccactttcatacctgatgcatggacctcagagtaatgtggcctatcttgattttccaggattgttctttcatttgttgttgtttttctcccttcctccccgtattttctcttcagaggacatgagacttcacaacctgcaaaaaatgaacttttgtaataacttcggacctactcatccaggaatccatgagtaatcagacaaaacctgagactagagactcattttcttctaaaattctttctccaaactatttttaaaaagaaaagggggaaatgtgaaaggaaagtaaatcytgtggcccccaaatcactaagctaaagggaaaagtcaagcttggaactgctcagggcaaatttgcctcccattctattcaaagtcaccccctgcccactaagataaatgcatatctgattgcctcctttagagaggctaatgcgaaactcaaaagaatgccaccatctgtctgttatctacctatgacctggaagccccctccccacttcaaattgtcctgccttttctttgrgtagtcccacccttctggaccaaaccaatgttcatcttacctatgttgattgatgtcttatgtctccctaaaatgtataaaaccaaactgtgctctgaccaccttrgcctgatgtcatcagggcctcctgaggctgtgtcgtggatgtrtgtcatcaatcttggcaaaataaactttctaaattaactgagacctgtctcagatattcaggtttcacaattctcaagccttctctttttcaatttataactcttttatctgacaggaatttttaaatttacaacatttttacttatttgttcaattgtagtacaaataaagaagtttcaaaactgataatccatacctctgtgagaaacaaatttactaactagcaggtagtgtttgtgtacatttctttttatctttagccttatggtataccataaaagtactgttttctgaagttatttaggtcagtcttttagttgttttcctgcctcccttaagtgtgattatgaaatttatttttcatatagttatatttctttgtgattgtattctattttgggttctattcacatcctagttgattttaattatgtattactttgcgggggggggggtgatatgcaaaactttcccttgtgaaaaaagatgaaagtcatactaaaaggaatactcagaagagtgttgyttctcacttgtctctactattctctgtccattttcttcttctttccagctaattcccttctcctcctgcagatttagttatcttttgttaatggcacctctgtgcagtacctctgttaccattaatgcagcaatgttgacatattatcaaacaaagttcacagtttaattagggttgactctttgtgttgtatattccatggattttgacaaatgaataaggatgtgtttccasttttatagtaccatactacacaaactaatttacagtattagttatctattgctgtgtaataagttttcagaaacttaaaatttaaaacaaaacaagcagcttagaaccacttagatttgttatctcacaagactgcaaacaagatgctgtttggaccatgttcctatgtgaagatcataaccctccacttggtcctcctccatgctcctccatggcctcaactcctagagktcctctccataggcagttacaacatgacagttaccttcttcaaggccaccaggagaatttctcaattcaatccgctaaggcagagtcttctataatgtaatataatcaagtgactgattaccccacatcctttgctatattccattagttagaagcaattcagaggttcttcctgcactaaaggaggaaggattattcaaaggtgaactcactggaggtccctctagggtgtgtctgtcatggtagctgcattcatttttggttggttcttcctgaaattcttttgcataaatgtgtagatacacatatattttcttttagcctcttctttcttatatgatggatacgagaccatagatcattttgtactttgctattttcacctagcagtagatgtgggaaatcatttcatataaagagatggagatcatttttcttttttttttcaaaatatgtttaatgttttcctcccaacttggagaggtcttttctggtggctgtctcagtggggtctaagcccctctttcatttttacagtcctccattgttgggatgtactataatttttccaaccattctcccaggatagacatttagggtttttctgctgtttcacaattacacatattgctttagtcggtgacctgtacatatgtattttcataatattgcagttatatcttctggacagattcctagaagtgggattactggctcaaaaggtaagtgcatacgtagttttgttaggtgataccaaattcccctacagaatagttgaactagctcacattctcactagtaatgtatgagactgccttttccactatgccctccccaacagaatgttttattagactttccattttgcaggcattcctcttataatgaaaaaataatttttccaagtcattgctgaaatcctaataaaaaaatcactgttcctccaacaaatatttattgaggacctactcaataatctaggtactatgtgggaatgcaactgtgagcaaaacaaaaacagtccctttcctgatggcatttcaatctggcaacacagagaaacgtatgccagatgatgaaacccccacacagtcacagaatattgtgtgctggattgttccatgatccattcagttaatctgggaactatgtctcccagaattctctttcccgtatggttctagattagagtgggccaacaggtaaatttgcccaagatttttaggggcggaaataaatcagtgacctttattctctgcaagtccttgtagccagaattctggacagactggtgcttgggtttctggagtggtttcaattgttctcattctcctctgctttgtgtccagcttttcttactgcccactggtcttgatgaccaactacagctctggcccaccacctgatgtttggctgcaggaccatagagctggtagctgcactgggataaccccttctagtagacctctccagaagctcccatttgcctcttactctgggaattggagacagtttctcagatttccctgtagatccaacttgtccaccgacccagtgctttgggactagcagtgacccttctttggttgtctcactctgtcttttagatttttgcttccctagctcctcttaaagttgcaggaggtctatttcccataataaatctctccttctttaatcttcataatgtttctgcttccctgactgaaccctgacctatacgtgtagtaagtgcagtggagaactaagtgctgcaacagcatgttgaacagaaggtcctcaactagtttggggatcagagaaggttctctaggaagatgacattttatctgaggtctgcagggagtttaggagttatctgggtaagtattttctgcatcttggctcactcaacatttattccagcctcctggtatctgtycctaaattccagaggctaaaaggctaaacactgcatttccctttccctctttccccttcttttaaaagattttactttttagagcygcgaggttcaaagcaaaattgagctgaaagtacaaatgtttcccacataccccttccacccaaaatacacatcctcttgcatcatcagcatcctgccccactgcggtagctcccaatgccttccttctaaagatccactcagagtgtggcagtcttcccaatgtcccactccctcaagggcaggtgttcctcctggctgcatctagttggccatcttgcccccctatcctaggctcagtctttggaactcaatgaaagttcctttttattcctagtttgctgagagttttaaatcatgaataaatgctggactttgtaaaatgccttttctgtatctattgctacgattgtgttgtttttcttctttaggctgtcgatgtgacagaatacattaattgattttaaaatgttggatcagccttgtatgtgtggaataaatctgacttggttgtggtgtgtaattctttttgggcattattggattcagtttgctaatattttgttgaggacttttgcatttatgtttttaagatatggtggtgtgtaattttcctttcttataatatctttgtctagttttggtgttagaataatactggcctcctagaatgagttagggagtattcattctgcttctaccttctggaagagattgtacagaattaatatgattttttccttaaatattggtggaatttaccagtgaaacyatctgggcctaatagtttctattttagaaggttattaattattgattcaatttatttaatagatgctggtctattcaaatgatctatttcttcttatgtgaattttggctaattggatctttcaaggaattggtccatttcatctaggctatcaaatttctgagcatggagttgtttataatattacttttattcctttaatgtccatggaatcagtggtgatggcccctcatttatttataatactagttttttgtgtattctctcttttttcttagttgcctggctagagatttataattttgctgatattttcaaagaatcaacttttggtgtcattgcttttctctattgatgtcctattttcaatttcattgatttctactctaatttttgttatttcttttcttctacttactttggacttaatttgctctcctttttttatttcataaagtagaagcttagattattggttttaggtstttttttttttctaatgtgtgtgttcaatgctatacattttcctttaaacactgttgtcactgcatcccataaattttttggggggtaatttctgctttgcagaaattaacatagctactccagctttcttttgattagtattagtatggtatatatttctccttccctttacttttaatctatatatgtctttatatttaaagagtctcgctctgtcacccaggctggagtgcagtggcacaatcttggctcactgcaacstccacctcctgggttcaagcgattctcctgcctcagcctcccaagtagctgggactacaggcatgtgccaccacacccagctaatttttgtatttttagtagagatggggtttcaccatgttggccaggctggtctcaaactcctgacctcaggtgattcacctgccttgacctctcaaagtgctgggattacaggcatgagccaccgcaccctactgcatcttacaaattttggtgttatattttcattttaatttagttcaaaatatttttaaattcctcttgagattttttttttgacccacgtgttatttagaagtgtgttgtttaatctccaattattctgagattttmtagctatcttatgttactgatttctagtttaattccattgtggtctaaaagcatgcattgtatgatttctattcttttacacttgttaaggtatgttttatggcatggaatgtggtctatcttggtgagtgttccacatgaacttgagaagaatgtgtattctactgttgttggggagaagtattctataaatgtcatttagatccagctgttagaagtgctgttcagttcaactatgtccttactgactttctgcttgctggctctgttcattactgagagagggtggttatgtctccaactataatagtggctttgtctatttctcctgcagtcctctcagtttttgcctcacktattttgacactccgttgtgaggggcatacacattaaggactgttatgtcttcttgaaaaatcgacctcttcatcattatgtaaatgcccctctttattccggataattttccttactctgaaatctgctttgcagaaattaacatagctactccagctttcttttgattagtattagtagggtatatctttctccttccctttacttttaatctatatatgtctttatatttaaagtgaacttgtagacaacatgcctggtctcttttgcagctaggtttctgaatgagattcaggatttgtaaataagatacaatcatatgagccttgaatttagaactgatttaatggctgagtgagtcaagcctgcaggaagtggttttgccagtacagtgtgtaggaggggtgttaaattctggggctgcagctccagcagcagcttctcgatttgacaagctggtttattgattgtgtcagggccaacagcttcctctgcagcccagtcttgaggctgaagatattagtagccaagtgaggaatgcctttattagggtgtgcaaaattggttcaactaaactgaatgttaaagatgatcacatgggccaggtgcagtggctcatgcctgtaatcccagcactttgggaggccgagatgggaggatcacttgaagtcaggagttcaagaccaacctggccaacatggcgaaactccatctctgccagaaagacaaaaattagccaggcatggtggtgtgcacctgtaatcccagctactcaggaggctgaggtgagagaatcacccagactgggtgatagagtgagactgtctcaaaaaaaaaaaaaaaaaaaagggctcacatgaccgagtgtggtggctcatgcctataatcccagcactttgagagaccaaggcaggaggatcgcttgagctcagaagttcaacacaagccttgtcaacatagcaagacctattctctactaaaaaatattagctgggtgtggtggcacatgcctgtagtgccagctacatgggaagctcaagtgggaggatagcttgagcctaggacatcatggctgcagtgagccctgattgcctcactccagcctgggtgacagagtgaggtcctgtctaaaaaaaaaaagagagagagagaaagaccatatggccattttagggtcttcatgctactgaacaataggctcaaaggaggaccacttagttggaagtgaagtacaaatatgggaagagggttatgcatcagtcagataaatgaaaggattaytaactgtggaggttatctatgaactggcttgctcaacatctatttcatctccttctagtgtacctttctactctgcagaggctggaaaggcaaaaatgatggctaaggcttccttgcaggtaagctttcatccattttaagattctgcctatcagatatatttgcttgggaattgaaatcagaattgagtgagtgggaaaagaggcaggacgtaaagcatggatttgctggtataggttgtcatagcagaggtgtgactctggggatagaagtgggaacaacagcttcatgatttaatgagcagctccttgttgtggtagaagcagccgttcccttaacagatcagttctgggatgtgactctgggagtctttttctggaaactcagtctaggacctgcttttccagcacccccaaggattctggagaatactgtaaccactagggctgcacacaaggaggaagtgtgatgttgaggaagtgagaaaagcccagcccagtggagcacaaagggtgaaacataggttggaggtcagcaggggccagattgctataggccactgaccttcttggctcaacctacggcactgtaaagccatgcttttggaggtagaacactgttaaccagcccttatcttcaatcagttcactatttactgactttcttttttcttcttttttttttttttttttttktgagacagagtctcactctgtcacccaggctggagtgcagtggtgcaatcttggctcactgcaacctctgcctcccagattcaagcgattctcctgcctcagcctcccaagtagctgggattataggcatgcgccaccacgctaggctatttttgtatttttagtagagatggggtttcatcatgttgatcaggctggtctgaaactcctgacctcaggtgatctgcctacctcggcctctcaaagtgctggtattacagacgtgagccaccatgcccagccagttcagtgttttcaacagaaagacattagattgcagtggtcagtttaggctagatgtaaagagcacctccttttagcaggtggttttaagactcaaaggaaacaagtggctagtgttagaatgacttttaggaggaggccaacagcccacttagggctacatagagcaagtctttctttcttttcttttttttttttgagatggagttttggtcttgttgcccaggctggagtgcaatggcgcacctctgcctcccagkttcaagcgattctcctgcctcagacccctgagtagctgggattacaggcatgagccaccatgcccagctaattttgtatttttggtagagatgggatttttccatgttggtcaggctggtctcaaactcccgacctcaggtgatccacctgccttggcctcccaaagtgccgggattacaggcatgagccatcgcacccggcctagagcaagtcttttgttgcagcaggaaactggactggatggcccttcatggaccaggcagcctgktgattccggacctcctcccagattggcctcwtytctccattgctctcacctctctgtgggatctgacccagggatacaaatgaatctacctcttcatcttttccagagagcatacttcatgctgttttctactttaagaattgttgccccagaatagccatctcacatccacmccaccctggcctgactgccccactcatattataaatctctcagcacataccaggcatggtggctcacacctctaatcccagcgctttgggaggctgaggcaggaggatcacttgagctcaggagttcgagatcagcttgggcaacctagggagaccgcatctttagaaacaaaattaaaaataagctggatatgatggcacacatctgtagtcccaactactcaggaggctgaggtgggaggattgcttgagcctaggaggttgaggctgcagtgagccgtgattgcaccactgcactccagcctgggcaacagagtaagaccctgtctccaaaaaaaaaaaaaaaaaaaaaaaatctaagcactattatgaaagcagatttctcctttgtgcttgaaataaacagggcctaaaagaatccctctttccatatatcttactccaaaggccttcccctgtgggtaacccacctcctatccttccttcagcaataatccagccctctgcctttttataaactgttgtacatctttgcatatttgtatttgtgtatcttatctgtcccccaaacaaggggcttctcaaagcctgggggtctctaaggatagaggctaacacagttcggatgtttgtccccacccagatctcatgttgaaatgtaattcccaatattrgaggtggagcctggtgggaggtgttcggatcatggaggcagatccctcaagaatggcttgggccatccctttggtgatgagtgacctctcactctgagatctcttgcttgttcctcttttctccatgtgatgtgcctgctccctctccaccttccactatgactaagcttcctgaggcctccctagaagccgagcatacgctggcatcatgctttctgtaaagcctgcagaaccatgaggccattaaacctcttttctttataaactacccagtcttaggtatttccttatagcagtgcaagaatggcctaatacagaggctgtctcttccttcagactgagaacccctggagaatacgaaatggtctttcccatcagacaggaaactcccagcatctcatactcctgtctctccacatcccacgccagaaagatgcaagaaacttcagtttaaaaccaatgcggagttcccagacacagaagatgagcagggacatcctctgagaggaaaactctggtggcttcagggsaatcaaagcaagtccccacttctstcctctcctgagctgaaaactcagagcaggctgggtgtggcagctcatgcctgtaatcctagcactttgggaggccaaagtgggaggatcagttgagctcaggagtttcagaccagcctgggcaacatagggaaacctygttaagtattaaaacaaacaaacaaacaaaccaccaaaattcagaggggacaggggaggtggcacactgctgtccttctttttcccctaccatgtagcacagggcctgtggaatggaaggggcgctgtcaatgtgtgttgggtgatggactggatgaataaatggtacatctgtgtgcctagggggcccattccagacaccaggtagtaaggcagccagatgagttctaggcctggccttcgagagactctgagatgatggacaagctgcttgtctgggccccartcaactcaccactggacagatctctgagagatctgtggccccaagtttctagagcccaggctttactactgagaagatccrtggacktggggaagcacctactcatagtccctcagagagtctgtgtttggtttacattgaagccaggcatagtgccatgtgcctgtagttctagctactctggagggtgaggtgggaggatgggagcccgggagttcaaggstgcagtgagctatgatcacgccactgtactctagcccaggcaacagagtgagaccacctccctaaaaaaataaaaatgaagatgaaaatgaaaaaaaccaaaagagtttgattttctcacaacaaataggtgccctggttagtgatggctgcccattccatcattttttcagtcgactttctgagtctatcaaactgcagtaaattctcctttggcctcaggatggagccaggatcttctccagtcaaatrtctctgaggccagctggggtcagtggaaactgtggggagagggatggggaagagcaggttctatctttgctcacatcctggagttgtttctgacctgcccargagaggctgcccctccagaactagactcttccttggctttaagatgtgaagtcgagcagctggaaggacagacacctcatctgaccactgttctatggaccaaaggcaggatgagcatggtaggtgcagaggctgcagttggaaacttgaaacccttgcctgggaaatgaagagcaaggccctgatttggaatgaatatgtttaaaataaaaataattacacagagttggaggagctcttaacacagatggagctcaatcatcccaatgtattgatggagaaacaggctcagcaagttcatggcagaaatggggctccaatcctctgtgaggctttgcccggtgccctagctatcagggaacacgaaatctgtccagtgcaaccaccttctctcatcatgtttgccacctgcttaagactctccttcaagtaagcaagtaagcagcatgttcttactgaccacaaagtagccattgttggggcaactctggcagtgaccttgatcgcctctagaatgcaaaatgcacttgacttatgcaaataccaacacttagtggccctttgactgccagggagcattatggacctttcgctgagtttcacttggacatatgaacttctgatctcaactgactcatttagttggagcagggaatcccaatgcctttggaaatagaaaatggatatgactcaggatgaaacatcagtggaaacagacctttcaagattttttaaaaaaatataactactggttagcatagtcataaaattagatagttcttcttccttatttagaaaacagaatacagaccgggtgtggtggctcatgcctataatcccagcactttgggaggctgaggcaggcagatgatttgaggtcaggagttcaagaccagcctgaccaacatggtgaaatcctgtctctactaaaaatacaaaaaattagctgggcatggtggtgcatacctgtagtcccagctacatgggaggctgaggtggcaggatcgcttgaacctgggaggcggaggttgcagtgagctgagatcatgccactgtactttagcctgggtgacagagcgagactccatctcaaaaaaggaaaaaaaaaaaaaaggaaacagaatacaaggtcaggcatggtaactcacacctgtaatcccagcactttgggaggccaaggtgggaggattgyttgaggccaggagttcgaggccagcctggccaacatagtaagaccctgtatctacaataaaagaaaaagaaagaaaacagagtacaaagggtggagtctgggtctccagtcttgtttgtctgcttgtaggtcctgctattccaagtgtggaccatgtaccagctccatgggaatcaccagggagcttgttaaaaatgtaaaaatctcaggctttcccccagacctggtagakcacaacctgtatcttagcaagatcccccagttgacttgtagacacaggaaaatttgagatgtactgcctgagagcaccaaaacatgtcaaacacaaaatagacctgaaacaaaggaagaaaataaagtatttaccatgcttgcattgtaatgagaatgcacgcaataacttcaggacatttatgacaataggaattctttttaaattagtagatggttctttttagaacagctttagatttacataagaattgtatagagttcccatataccgcccccttatcccaacatatacagattttcctcttattaacatcatgaattagtgtggcacacttgttaaaatkgactcaatattgatatattattattaaagcccatagtatacattaaggttcacctttgtgatgtgcagttctatgggttttgacaaatgcataatgtcatgtatccaccatcaccatatcctacagaacagtttcactgccctgaaaattctctgtgctctgcctgttcatccctctgtcctcccaaacccctggcaaccactgatctttctactgtctccatagttttaattattccagaatgtcatatagctggagttatacagtatatatccttttcagattgaattaatttatgcctttatgttcctccatgtctttttgtgatttgatagcttatttctttttgatagcttatttcttatactattgctaaatagcatcccattgtatggctgtatcagagtttgtttatacattcatctattgaaaactcttttggttgcatccattttgggaaaatgatgaataaggctgctgtaaacatttgtgtgcaggtttttgagtgacyataagttttcagctctgttgggtaaatacttaggagtacaattgctggattgaatggtaacactayatttagctttgtaagaaactgtcaaattggagcagggtgtggtggcatgyacctgtagtcccagctactcaggaggstgaggcaggagggatttcttgggccgaggagtttgagactggagtatgctataatcacacttgtgaatagccactgcacagatgcacaaaagaaactgtcaaactgtcttccaaagtggccgtgccattttgaatttccactggcattgaatgagagtccctgttccacatccttggcagcatttgtggtgttaacgtttyggattttagccatcctcgtaggtatgtcatagttattttgatttgcaatttctaatgacatatgatattgaatgtgttttcatatgcttaactgtcatctgtatgtcttctttggtgaagtgtctgttcagatcttttgctcattttttaattgagttattcattttcttatttttgagttttaggagttcactgtatattttggacacaagtcctttatcagatatgtgttttggaagcatttctcttagtctgtgacttttgtattgttcacaaagcaggagtttcatattttaataaagtccaacttaacatttcttttcccagctccacattcagyggtatcatgttggtaacttgggatcagccatattgggggtatttacactgaagaaattggcagactctacaaatcagggatttccaccttccttacaagagttgattgttaaaccattttatagcacacgactgcctcctatgaactttctaytgaatcattccagttggtctattactttagttataactttttttatgtaccagagaagctttttgttttgtgtacatatgtaagatattggtattttatttttcttttgatttaatttctcttggcaaggcatggtagctcatgcctataattctaggactttgggaggcagaggcaggaggactgcttgaggccaggagttccaaaacagccagagcaacatagcaagacctcatctctaaaaagaaaaaaaaattagtcagctgtggtgacatgtgcctgtagtccgagctacttgggaggcttgggtggcaggatcttttgagctgagtagttcgagatggtagtgagccattatcacaccactgcattccagcctgagtgacagagtgagaccttgtctttttttttctgagacagggtcacactctgtcacccaggctgcagtgcagtagcacaatcatggctcactgcagcctctgcctgtgaggctcaagcgatcctcccaccttagcctcccaagtagctggactacacgtgcacaccaccatgcccaagtactttttgaattttgggtagagatggagtctccctatgttgcccaggctagtctccgagtcctgggctcaagtgatcccacctcagtctcccaaagtactgaagtactgagattacaggtgtgagccatctcatccagcaagaccctatctcttggaaaaaaagaataaccaaaatatgtctaaagaagagagaagagggattttccttagtatatatgaagacttaaaaaaaattacagtaattaggccaggtttggtggctcacgcctgtaattccagcactttgggaggcygaggcgggcagcttgcctgagctcaggagttcgagaccagcttgggcaacacggtgaaactctgtctttacaaaaatacaaaaaattagccaggtgtggtggtgtacacttgtagtcccagctactcaggaggctgaggcaggagaattccttgaacctgggaggcagaggttgcagtgagctgagattgcactgctgcactccagcctgggcgacagagtgagactctgtctcaaacaaaaaaaaaaattatagtaattaggcagagtgatattagggcaagtgtagaaaaatagatcaaagcaacataagggaagcccagaaatagatctaagcataggtggaaacttacgtgataaagaaaacattaaaatcagaggggaggccgggcgcggtggctcaygcctgtaatcccaacactttgagaggctgaggcaggcggatctcctgaggtaaggagttcgtgaccagcctcgccaacatggtggaacctcatctctactaaaaatacaaaaattagccaggcatggtgacaggcccccgtaatcccagcttctccggaggctaaggcagcagaatcgcttgaacctgggagtggaggttgcagtgaaccaagatcgtgccattgcactccagcctgggcgacaagagcgagactccgtctcaaaaaaaataaataaaaaataaatacataaaaataaaataaaatcagaggggaaacactgggctgttcaacaaaaggtgctggaatcattgactttccttaygggtaaataaaactaaatttctgcctcatactacacatgaaaataaactccaaatgaattaaaggattaaagccctaagtgtaaaaccccgaaatttagaaccaataggagaaagataytgagaaaaatattgttaaactcatgttacagagagkcatgcaggactttgcaaacaaggtactaaacattactgattgataacttgtatggcatgaaagttaaaagtggtagttttttttttttttttttgagatgggatcttactctgttgcccaggctggagtgcaatggcacaatctctgctcactgtaacctccgcctccygggttcaagcgattctcctgcctcagcctcctgagtagctgggattacaggcatgtgccaccatgcctggctaattttatatttttagtagagacggggtttctccatgttggtcaggctggtctggaactcccgacctcagctgatccgcccacctcggcctcccaaagtgctgggattacaggagtgagcccccacgcccggccaaaagtttttatattataaaaatgccatmaataaaagacaactggcatgcttacagaatatatttgcaacatatatagcaaacacttgttgtcttgttttccaatgtgttgcctcctggaagccgctgatacagaagcctgagggaacacactcccccctacgtccttctccaacacagcagagccaggaaggacccggatggaagttaggacaaagaggcccagaattggcacagataccaacagaccattcgttgaagaagaaatccaaatggccataaggtgtgtgtaaaaatgctcagttgcaccaacagctaggggaagcaagtgaaaacaatgatacrcaattttatactcatcagattgggaagaattgacaaatgtgatattatcaagtgctggctatggtgccgctaggaatgtaaactggcacatccattgaagagagtattttaggaatgactggtaacgttgaaaatgtgcatgcccctcatctgacctatgcaatatgcttacaaaaaacatttaacctgataatcatgaggaagcaataggcaaatccaaattggtgagtattctgcaagacaactggtctgggttcaagagcatcaatgtcattttaaaraagaaaccagattaagtctggccrtggtggctcacacctgtaattccagcactttggaaggctgaggcaggtggatcatttgaactcaggagtttgagaccagactgggcaatatggtgaaacccctttccacaaaaaatacaaaaaattagccaggcatggggtggcatgtgcctgtggtcccagctactgggaggatcgctgaagcccaggaagccgaggctgcagtgagctgagattgcaccactgcactccagcctgggtgacagagtgagacctcagctcagagaaagaaagaaagaaagaaagaaagaaagaaagaaaccagattaaagaactttctagattaaaggacaccaaagagccacaacaattagatgcaatgcctgattcttgttgggattctggatcrgaaaaaagccaacaaattggatataaaaaccattattgggacaataggggaaatttgtatattagatagttttactgtatactagatacagtattgtgttcatgttcttgtccccgccaagactgatgagcccccagggactcagatagtcaagattctaagcaggctgtcagagccttaacaaggttctgagcccaggactgaggtaggggttacttcgggctgaggggattagcaaaggcttgtgaagtggctaaagccgtgacctggatatttcaggactcaaatccacccgcattggaattctctgggtgactgcccagcccctttggcaggacagccagccacrggccctgattgtgcaggacttcctgmctctgcaaaggcagtcgggggctgagcagggttctacccggctgggtccaggcagaagkttttcctccccacctccgggtttgtcctcatcatcggtcactcccattcacagctttaagattctggaggccaagaatttgactccccycggatccatggtctgtggataccaatgttccgactggagacggggagcccgcgagacccgggtctccagggtctgcccaaggaagttgctcatgggagcagacctctagagcaggatttgaggccaggscaaagaggttagttactgatgggggctgcataaattgggggttgtggagggacgccagctgggagggagagactggagaagggggtgtgtggagagccmaagaggaggcccagggggaggtgcgcaggcacagcctctgttgaaggagtctctctaaggctgctagggtccttcacctgtcattgtcaggcctggagagcgggctyttaaggaggccaggccacacctcaagggaagatggaggttaccggaaggtcatacctaaaattacgggcaaaaccagggagarttatgaacaggctgagttaggacttgtgtttacgttaatctgaggccttgcttggatttctttttaacctaaaccacaggcaaatattcccctttagggagagaattcgccgacatctatttaacatcccttaattgttgagagcatccactgtgtgccagacacttcsgtacacacagaaagaaacccagaggagggtaagatgcccttatagggagatctttctcctcccttcctccatctctccctctctctctctctcgcttccctctctgaagacggtctagctttgggctaagtatacgtggcctcaggagtcaaatggatcaggacaactccgagctttgtcactgaccagctgggcacaggtgtgagtcatttttttttcttcaagcctcagtgtcccaatctgcaaagtgcatatgatggtaatatctacctcatagggtcaccctagggataaaatgagagaagscccataaagaacttagtgtggtatctgggctcaataaggcatcagctatttttattagccattcaacaaacattttttcctaggayccaatctgtgccatgcagagtgctaggtgctgccagggagagataaatgagacaccctcaaggattcacagtctagtttgttcatttgttgattgatttcatcaataaatatgtatcatgccctacactgagcactggagatgtcaaagtattaataaaagacactgtccctgtccgcaggttgctcacagcctggtgggagagacattgcaacacaatgtgattggtgctgtgaagagagrgagcacacggtactgggagagctcagggcagggggttgatccagttccgggcagggcgatggattcacaagacattttggcaaaggtagacccagcttccgtgtttcccagctcacaggtgcactcctaccctggggcctttgtacttgctcttccctctgcctggagctttcttcccctaggatgtccccatarcttgctccttcacggctttactcaagtgtcacctccccagcaagacctttcttggccaccctgtttaaagtggmcactccagcccagtgtggtggctcatgcctgtaatcccagcactttgggaggccgacgtgggtggatcacttgaggccaggagatcgagaccaatctggccaacatggtgaagccctgtccctactaaaaatacaaaaattagccaggtatgatggtgcacagytgtagtcccacctactcaggaggctgaggcaggagaattgcttgaacccaggtggcggaggttgcagtgagctgagatcgcaccgctgcgctccagcctggggcaacagagcaagatgtctcaaaaataaataaataaagtggccactcccaccatcaacagtccccgtccccatccccaaacacacacactcagcactcccaccctgctccctgctttatttttctccatttcatcgatcaccacctgacaagctgtacattttacttattcgcttgtctatttctggcttctccctccagaatgcaagctctgccatgagggtagggttctcagctgttttgctctttgctgtatccccagtgtctagaacagtgcctggcacatgatacgtgcttgctaaatagttattgaatgataagtacgttaagtttacaaagatgagtaggagttgagtaagacaagaaagggagggaataacagatgaaaagggaacagggggagggagagagagacagagaaagagagagagagattgaaattagtgagtttaaggaactaaaagccttcacatcsagcttattcccaggaatgcgttaggggtggtataaggcaaggctggcgtaggttgggggccaagctgtgcgaggccatgtcctgtgaggggagacaggtgcctctgacttgggcggatgtgctatgtsctgttacagaggttaggaagattgacccaggaaaaaaggaggaagccatgaactctgctggggagctatcagggaaggtgtctcaaaagaggaggcacctcctcttaggcccagggaaaaagtttcagtgttattctagacgtgacggacattctgaaggcctgttcccacatcccctgtcttaacagacagacactgggttagaaacttttcggtgcttgcacgggtggatttcactttgcatttggtcctcgtagtgcctaacgggacctctgcccacaaaattgctcaagaaagatttgctgggttggattgggattgaggcaggtggagyggccttgaattgtagatgattcaggctcatgagcctagaaccttgggcaccatctgtgatcttgccaggcagagtgacagcctttcctagggtttctccctcctcaaaaaaagaagggacattaaccatgtggaaaaacaagtagattttaaccagttagaaaaagagagtggagagcattttaggtggaggaaaaacaacagaaacaaagacagaaaggaaggttagttcatgggagatttcttaagagtgaacagtttaatggattacatttttcaaagataaaacatgtatttgctatgaagttggtgtgtggattgccttcttagccaaagttatggtgaaagttgaacttgagcctgttattaaccaatagctgtaacatatgtataagctgcatgtgcatgctaggctgacacccagatagaactagtggtgtgtatctttacaggaagctgccaatttacagcctggctgaaacccacttggggctgcttctacttccacatttaattggttcatccatcccatcattcttttattccacaaataattatcagccaccagatatgcattaggggccgggtgcggtggctgacacctgtgaccccagcattttgggaggcagaggcaggcagatcatttgaggttgggagttcgagaccagcctggccaacatggtgaaaccccgtctctatgaaaaatacaaaaattagcccagcgtggtaatcccagctactcaagaggctgaggcaggagaatcacttgaacctgasaggcggaggttgcagtgagccgagatcacaccattgcactccagcctgggcgacagagggagactccatccaaaaaaaaaagaagatatgcattaggccctctgctacctgctaataatataacaaagaacaagatgaacatgtttcccgccctcagatgcctatattctaggggcaggcataaggcacatgagccataaacaagtaagtaaaagagagttaaagatgacggtcagtgccatgaaggggaaaaacagggtgaccttgggtaggtagtcaggggaggcctcctggagaaggtggcatttaaggcgagacctggaggataaagaatcaaggactaagtattctaggcagggggagcaggaaatgcaaaagctgttgttggaaaagctcagagagttcaagaataagtcaattcgagagcacagaatgtcagagcctgcgggcatcctggagcccatccacttctctcatgctggtcattgctcttgtaacatatctgcacacgactctggcctgcataaactgttgcagggagggggtcctacagggcagggagcacaaaataattgacagctctctccatgttacggagcaactgaagggcttatgagttttctttgtttttgaaccttggcaaaatgtaattttaaaaacattttttacaggatagaaccgaggcttcataactgacgaagctgacttcatgagctttgacagatcttgtctgcattttaagtgtttccaacacttaaagattaagttccttttcctgagaagtcgagcgggggcatatcccacccactcagtgcccacctcccatgcgacatttcttttcctaaaaagtggcaaataaaaagtgccttccggggagaggaaactcaccactcccaagacagctcattcaattcccaggacacatgagctgttagaaaaacgttcttggattgagccaaaatctgactgcttagcgcgtccgtgcctggtgggtgttggttccgcaatctggagccacatgggacagttctgattcctcctactccccacagcccttcagagatytggagacagactgggtacccccagccactttccaaacccaagtcagccccaattccctcccttctgtctcctgtgatccagacacctcctaagcctcctcacatgggggcccagggccaggcacatccctctgggtgtggcctgctaggaaccctcgttctgggcaccacagtcctgccaccaccgccaaagatgaccactgcctctgtgatgtgactagtactgggtttgggggtcacgcatgtgattgctgagctgtgttacccaccctgtccttgtgcagttcagctttgggggtctttggacagggcctattcactctcttcttatagaactcaggttatcttgttcttgatcaagatcaggataagatcaggacaagatcaagatccaacctccttagcctgacccccaagggcctttgtgacctacccagctccatctctttggccagtccttcccaccattcctgaattcctactaaacacttgaagaaagtttctgagcagtcacttgggggcatgtcccaccatcctgttaaaaataaccagtatttattgagaccttactatgtgcctaaacatctaccgtgtatcaactcagaacatagacatgagacaggtacaattatttacccaattattcatgatggtgaactaaggcacagagcagttaagaaagttgccagaggtcacacagctaataagtggtcgttccagggcatgggcaccatgcatccagcctcagtccatggtgtgcagcttgtattggcttatgagggctgaccagtgattcctccaggcagagagcaattgtgaggcagattagacttaagactgtaaggagtggttaaggactagggcagagcaaaacacataccacatctatgggggcagctacttcttggcaatggccagttgttgcctgtaggagtccagacccaggattcctagatcttttaaaaagaaactggaaatggaaatgtggaaatgtggatttctttctctttttttttttttttttttttgagacaaagtctcactctgtcccccaggatggtgtgcagtggcgcaacctcggctcactgcaacccccgccttccgggttcaagcgattctcctgcctcagcctcccaagtagctaggattacaggcactcgccaccacacccagctaatttttgtactttttagtagagacagggtttcacctcactggccaggctggtctcgaactcctgacctcaattcgggcctgcctygggctcccaaagtgctggtattacaggcatgagccactgtgcctggcctggaaatgtggatktmtgtctaggatctcttagcatttatacattggcagctaattccattttgttttttttaaagcaccgtgtagatcaagcaaagcatttcttagggctgtatggagccctgggctgaaagtttataaccaaaaatccagttccactcatcggcaattattggaacactgaaccaacttaaccaactgtaactcagctctcacttttccaccttgtttataaggaaaccacgtgacactctggttagatgtcttgtgaaaatcccaatcattatgtccttactgggtctcaacccttttttgtaaagaacacagatttgacagacagatgggtcaggtgtacgattctgggtcctccttttactaactgtgtgaccttggatgaggtacctaacatctgcccctctgtttccttgcttacacgttgggatcataatgccccatgagattttgtgaagattaaggaataccatgaatgctgaacttgccttgcacttgtagcatagcaaatgttcattaaagaccgagttcttccctcattcctttctgagccatcagccttgtaatcccctccaacaggaaatgccagagtggacagcatatcagatgagttctataacattccagagacaggtaagctccctgtggaaagaaggatcatggaagacttcccggaggaggaggacttgatgtagattttctgccaatgagctctgggtaatcctgttgcatgtgccaataaaccatttgacaaggccagggatatctcagcagcttaggttctcagggtgagggagtttccaggtttccatggctacccttggcagggctttagccctggggcgagcctgcatgtgatagacccagcaaatgacagagaacaagtgtgtttatgtgatgtttaattagttctacaaatagttcttgaggatctataatgggtcagacattgttccaggtgctaagatcagaaatggatcagaggacaattttgccctcaagaggcttccattcaattggaggtggaagtggctggggcatctttaatcaccgaagtgtgaatgattggatccattgccaagaaaggggaactgggaaagactgttttgaggggacagtgagtttagttctgaggttcccaagggttattgggatagaatatcagactctatctatcatctgtctatctatccatccatccatctctgtgtaatcatatttgacgtgtggactgggcagtggggtgagaatggagctggagccagaggagtcgtgcattcactcagcaaactcttactgagcacctactrtgtgccaagtgttgggttacagaggysaagcagaygcagagcctaccctcrtggagttctcagtttactgnnaagacataatcacaatatttatggtagttatgacttactgagcacctacagggtgccaggcactgtcccgggccgttctgcctgactnatctcatcgaattatcagcgttactaagtgagtctggttctatgattatcctattttacacagayaaaactgagacccaaagaggagaaaaagctggttcaggtgacacagtggtcacagctgagacacagatttgaacacacgtctctcctacgttggatcttggatctgacattgtgctttctcctggttgctgtattcagtcattccttcattaagcattgtttgttgagtcaaagctagggccaaacttctctgtccgggacacccccggatgcctgcatagaaataagagctaaatccctgaactcgaatgagctcatccagagagtggctgagacagagaagggcaactccagagggcaggtcccacaaacayacctgcatttggggggccagcagagatgggatgggsggattagccacaggagggcaggcggcacagtgcagccttgtgaagcccagagggagagagagtttcgagaaggaggaggtggacttcaagatgagtgccctgaaggactgaggaggtgacccccaagcttgggctatgccaggctttgggggtccctgagggcaagctcaaggatgcagcagatgccaggcagtgaagggttcagagtgggggatgacgaagggcagccttctctgtttagaaatttgacttttagagaaaaaaagaagtagaattgtccctagaggcaagggattttttttcttttttgtggcttggttttgtttggttgagaatggcggagcaggtgtgtgttcgtaggtgggggaagaaactggttgagaagaagaaacgaaaatacaggatggggagaggactcttccccatggctctgatcaccgccagacaccatctgtgtttacttctgtcttcacgatctgtttcccaccagccacaagggcagctctgtgaaggcacaagttctgtctcattcaccgtgggatcccwgtgcctggcacgtagtagacacttcataaatatttttgatattgagttgaattcacagrgttcttccgggagcccagtggttagtcctaggaagagaagggttcatgggggccttaaggaggggcttctctctgatgctaccatgacaagagagagggagagaaaaagaagtcaacacaagtagaggcaggagccaaaaatccaagtctttggcggggtacagtggctcatgcctgtcatcccagcactttgggaggcacgggtgagaggatcacttgaccccaggaattcgagactagcctgggcaacatggtgggaccccgactctataaaaaatgcacaaagaaattagccaggcatggtggtgcccactgtagtctcagctactcgagaggcagaggcaggagggaagatggcttgagcccagraggtggaggctgcagtgagatgtgattgtgtctctgcactccagcctgggggacagagacagaccctgtctcaaaaaaaaaaaaaaaaaaaaaatccaagtcttctcaaaaaagtgtgtgtggggtggtggtgtgaagggtggaattaacagaagtagaaaatggagaatactagtagctacttatgtcctgtgagaacattctagaaggtgagctgtcattgatttattagcattactctgcctttgctatggctctaagttataaatttaagaattcatttaatcctaacaacagctctctgaggcaaatgagcttcagtcagccctgaggtgatgtggctagtggtgaggaagccaggatttgaacccaggacttggagctgatatagagcctgtgatgttacccactgggccatatacttccccaactgacattagtttatatgccttatttttatttttatgtattcatttattcattaatagagacaggggcttgctttgttgctcaggctagagtgcagtggtgcaatcacagttcactgtaacctggacctcctgggctcgggccatcctcccacctgagcctcccagggtgagccattgtgcctgacccacatgtgccttgttttatatactacattcctcaccaggagcctctgggtttggaggggctcataattctcatgttttacattaagaacagagaaatatagtgacttgcccagggtcacacagatactaagtggctgagctgggactccagcttgcatctctctaaccgcaagcctggcactttccccttccctgagagaagaactgtaggaagttagcacagagtcaggtgccaaaaaagggctaccacctggacgtggcaggcaacattctgtggtgtttctgcaggcatctcccgagtcaccccagctcaggaacaaggcaraaaaagttgggggttggcaagttaggaacaagaggaagaggacggggacaaagctgcaagtccgggagyggggctgcctgtcttctctggcagttcctgggttgaggctgagcaaaacaggataaaatctgagcaggagcccacggctgggggacttggcaaagacccagtgtggtgggtgggagggaggctgtgccctggagggggattccagggttcctgttcttagtggggaagagccctggatcgagggtggcccaagctcaactctgatcactgtccctcctgatagccacctgggcactgtgacctgcttcagaaaacagctgcttctgtggcagtaatcccagcactttgggagtgtgaggtgggtggatcacttgaggtcaggagttcgagaccagcctgaccaacatagtaaaaccccgtctctactaaaaatacaaaaattagccaggcgtagtggcatgcacctgtaatcctagatacttaggaggttgaggcaggacaattgtttgaaccagggaggcagaggctgcagtgatctgagatagggctactgtcctccagtctgagggaaagccagacttcgtctcaaaaaaacaaccaaaatmaacaactgcttctgaatacacaatggaaaaaaatccccaggggttgtgccagggtgaggggaagtagggcttcctgtgtgacttaccaggaatcttggagctggcccatgcaggggtgtgggaggtgacagagaggtctttaaaaccaggtgggcccagccccggcctcttctgtgggcctgaggacggagaaaaggtctcactggtgaggaatctcatctttggggctgctttgcctgagggaggtgcagagagcagggccgagagaggggctatgagaggagacacctggcccccttggtcaggggagcagggcccgaagaggagtgaacccccatcacctctctcacagacagcaggagggctcagcagtgccttccgtgcaatgaggctccgcactgtgcgttctttccagccaggagacctgaactgggaggtcttggagctgctgcatgtggacttgggggacccgtcccttggcaacctggccacgtcctggcctccacatcttcctatgggctgtccgtctctattctctcccctctcattactgcaaccgctgccctcctctgaaattctctcgcggctatgcgcttcctctctgtggtcgtttgattaaaatagctgagtccacatcctcctcctggcgcccgctttgggctctgctgagtggatggctctccactcttcggggcagccactccatgcctctgccacctccaccatgaaactgcttttttactctttccagggtgtgggttttctccaggtatggggaggccaacagatcaagaaatgattgccattgaaaagatagcttgttatttacagctcccagaagaaggcgtgcttccacccagggccacgcaggaagtgccaggtcggcaggtcaggaggagccacgggaagcatcgcccagggcctttgctgtgatctctgggaaaggctggtggggcaggggacacagtttaggaccggtcagtttgaatcatgtcagtggaactccaggcttccctagttgtccagtttctggccctggggtgatttagggcaggagaaaccttggcttggagtgtgagagtgagggaaaggtggcccgggtgtaccaaggcactggttgtgtcagcagtgggacgtatccatacaggcctcagcatcctcaggtcttgcctcctcagaagaaagaattctcatggctgtaatcccagcactttaggaggccgaggtgggcggatcctgaggtcaggagattgagaccatcctggctaacatggtgaaacccatctctactgaaaatacaaaaaattagccaggcgtggtggcaggcacctgtaatctcagctacttgggaggctgaggcaggagaatcacttgaacctgggaggtggaggttgcagtgagccgagatggtgccactgcactccagcctggygacagagtgagacaaaaaaaagaattcgactgagggacataaggcagaaggagagactgaggcaagtttcacagcagaagtgaaagcttattaaaaagctttagagcagggatgaaaagaagtaaagtacacttggaagaggggccaaccaggcgacttgagagattcaggggttctgtttgacctttgacttggggttttatacrtggcatacttcaggggtcttgttttccttatcccctgattcctcccttgggttggtggggtgggctgtccgcacgctcagtgacctgccagcacttgggagggagcatgcacagtgtgttgactgtagttgtacgcatgctcccttgaggcgttcttcccttaccagccgaacgtccctagcaggtcatataccagttaaatgccgccattttgcctcttcatgcacatgtgtgagcccactcacccagctcctgagatcttactggaagctgctgatcacctgcttcaggtattcctgtttattgggagactacctttccctggtgctggctgtgaccagttattattttagagagatggttaataatttcctgcccatcacctgatggttgcctgacattcctgccctgctcctgtctgaccagctacctactgtcacagttggtctgtatatgaaaggcatgctcacagaggagccatctgaggtgtctaggaattaactagcagccctggaaggagcaggctgtctctggcctccaagatgtcaaagcgtcctaaaatatagaaaatcaaaagcatgtttagtgcccagggatgctcagaggcagtggagtagagtcagtcaaggaaatagattcacagttmtgggctaaacccttggggamctcacttcaattgtctgagcctcaatttccttatctgtaaaatcaacaactgttattcattgaacaagtgactgtttaaaaggacagacaccgggcctgccaaggtcattgatgggtttagagagatagaggatagtgcttggcacaccagaggtgctcagtgagtggcaggtggtgtccttgtgccacagctccagggagcagcagagaaagattggtgtggaatggtggggtctagggccatttctttggctgtttggagcccttggagcagaggctatgggtggacagaaccctcaggaatgttcttgggattcagagttgctgctggacaagggttgtcccagaggccagctgtggacagaaccttcaggaatgttcttggaattcagagttgctactggacaagggctggcctgccagcccagtagccaggagcccaggggagtctgaagcatgtttggaggccaggtcttgggaggcgccaggggttcaggtagagctctggcacaagcgaccgttcaactcagggacttgagacaacagagcactgaaggggagagccccaggcctgccgagctgtggacaaacaaggactttggatcctaggaggaaggcaatcaggcagctgccggcaaggaacctctgagaagccaaattagaatcaggtgctggcctgagacacatggaatttcctggactctaagctggcaatggctgtttttaccaaagacagattctaaggagtgaagccaagggctctggcctgagaggtagagcatgagaaggaacaaacacagacccctaaaggattcatgcctctgggaagggaggctgcgtggtgcagtgaggggtgcagaaggacgcggctcgaatccagcctccactgcttaatggctgtgtgacctctggcaaggtccctgagctttctgagcctcaactttcccagtggcaaaatgagaacagtaatacctaccctgcagcactctcgtgagcccccagggttgacttattctttaggtagacacagtgcctgggtcccaggagagtgtcttaattttataaattcttttaaaatcaagaggaaggaaatgaacataataatgaatatataataataaatccagcttggattacatttttctttatagcatcatagttgtcaaaaataattatgtgaatatagatataaagatatagcagaaagatgcctacaaaggcaaaagcgcttggggcccataagagccataatcaggccctgaaagccactggcacattgtgggagcccaggcttcactgctgagcacctcctctgggccaggcactattctcagtggtagaatagaggtgtgcatccgcccagcctctgcctgcaaagaaccatcagggtagacatccttraaaacaggcaactacagcactgtgagctaaaaggagtatgagatgtagaatcaccggctttccttctgccctcctgctgtgggcgtcaagtgctctctgtccaggaatttttttcttccgtcttacatctttcatcaaaggccatgtctaggttatatcaagtcctgcttctccacgtatgccaccaaatctccatttaagaatcctgcccattctctggtcccttttagccattttgccaacggggtgagtatgtctggggtgtttgtggctaaaagtgcactggtggtagggacagtgtccctgcaaatgcttccattattgtccctctgcctccagggccctcagtggacctacagttttttgcctcatcttttctggctggactcatcttgtttattgcccaccatgacggggagtggaatagatggggcctggwggagagccagggtgggatctgaatgggccacgggggcattgcctgatagatctgttgtgggatgtgtttttttttccagaaccccagagatgaaaggyctcctcccactggcttggttcctggcttgtagtaagtgctggccccgtgaccttcgaatgaacttttaccccatgggagtaacagggtggtgaaaaggacaccagccattgaggtcgtagagacttgggtttgaatctcggctctgcactgactgcatagacattcagcaagagccttcatgcctccgagcctctgcttcctcatctggcatgggctaatgcagtccatgcgtaaggctgtggcagggtcctaggagatattgtacctcagctgtgtaaaggttgtggacatagaggttatgtggctggcaagtgtaggaggcagattttttccctgtatgcaaataaaataagatttacaaaatcccccaatcaatccaaataaaaatcaaaactcttatctaaatatcccaacctatgattcctgggtcattctcagctcaggcttgtccagctgggaagtgactgtatagatggctttagtcccatcctgcggccccgtgaccgtatatacaacccccgacaggctgtcctgctccttgatgtcttgctagatccctggagactccaggaggagctggaggcctggtgcaaggagagagccttgggctcactgtgaaaccctggacagggcacctcttccctccatgcctcagtttcccattagtaagatgagggaactggcttcagcgatttctaagagtcccatcctgcttttagattctctgccttatgttctaaagggtgtgaggggagggagtggtggggaagagggatgtattgccaagagagacaggaagctcctatctgcctgcttcatgcaaatacattatgaattacaccttatatgtcatggtcacttactatgtgtctgccaccgtgctcaaaatttacatagttgatcttattttaaccctcatgacaactccaagatgtagctgctaatttggggtccccgttttccaggggatgaaactgaggctctgactccattcaataccatactttgaattagtggcagagccaggatttgaacccaggtctgctcatttttcaattccaaactcttaaccagttctccatactgcttgcacctcccttcccactaatggagagaataaaaaagagacatgcaggtccctccaagccctgggtgggagaaagggtaggagatgttgggcagtgggcctaaagcagggctgggctgcctgggtgtcacctggggacatgggctatcttccaggtgtgcctgctgtgcaaggaggcttgctggacctaaaatcaatgatcgagaaggtgacagggaagaacgccctgacaaactacggcttctacggctgttactgyggctggggcggccgaggaacccccaaggatggcaccgattggtragctgatcgctataactgccctttaggctccaggctctgcacccatgttttcttattcaattccatatcarttctggaagatgagtattaaagtaccattttacaaataagaaaactaagcctcaaagaaattagctggcaatcccaagatctcagtggcctaaggtgtcagttggtcaactgtggcgtaacaagtggtcctcaatgtagtagcttatacagcactggtcatttactttgcttatgaatctgccatttgggtagggcttgtggggatggcttgtcgcagcttcagcttggacaactgaggctggacaatccaccttccagatggctcactcctatggctggcaagtggtcagcatctcctggcctaggagcgggtcagaggcctcaattcctgtcacttaggcctctccaaggatgttcgggattcctcccagcatggtgactcttgggttgcaagagtgagtgaccccaaactgcaagaccaaaggatatggtgttttatggtcagcctcagaaatcccattgtgtcacttacactgtactcttggtcaaagcagtcacaaaggctttaagagggagggcatctagattccacctcttgatcgggaagtgctaaagttctagaagaacatgtgaaatgggagattttgctccttggaaagcatacccaactgggttaacaattctgatactgctagacatatataaaggaaagggatgattaagcaaatgaaggacagatggttggggccaagtttctcactgttggagtgggataagccagggcrggaagccagaatgatccatgtgcaaaaggactaaagttggagacatcagtatggactcctgtttagcttattgtagatacagatgtttacatgtggaagtatgcataggtagcagtatgcatagatatcatggatatattagtatcatactaatataagatgtaagtaataggagaaaatggtgtttcctctgtaagatcttctcagtttttctgtaaaccaagaatactttttatgtgcaatctgctacacctaacatacagtcatccctcggactggttccaggacccctgtgaataccaaaatctgcagatgctctagtccctgatataaaatggcacagtattttcatataacctgtgtgatcatatactttttttttttgagacggagtcttgctctgtcgcccaggctggagtgcagtggcgcaatctcggctcactgcaagctccgcctcctgggttcatgccgttctcctgcctcagtctcccaagtagcatatacgttttttttttatacacatgggcaaatagaaacattcttttgctatcagtggagagggtctaaaagaaatgacatctcagtagcaacaagcacacttaatgcctagatctagtttccaatgtcattcttcaatagaaggccccttccaagtcatatatatatatacagggttccttgaagaaatggtcaattctaggaccaaggcaggaaatatacgagatgagcctggaacttcttttagtgccaaaaagtaaggaagtgcttaaataaacgcaaacaaaacggaagcccacattgatggggatgtgacaagtggcacctgtgctgactgaaagagcccccagtggccaaccctggaacaatttagcaacaaaataaatggccccaaactccagtcttatcatgagaaaaaagaaaatcagacaaatcccaatcgtggggcatcttataaaatgtctaaccagtaccccctcaaaacagtcaagaacaaggaaagcatgaggaactgccacacccaagaggagcctaaagagacaagaccatgggccgggcgcggtggctcacgcctgtaatcccagcactttgggaggccragacaggtggatgacctgaggtcgggagtttgagaccagcctgaccaatgtggaaaaaccccatctctactaaaaatacaaaattatctgggcatggtggcacatgcctgtaatcccagctactcaggaggctgaggcaggagaatcacttgaacctgggaggcagaggttttggtggtgagctgagatcgcgccattgcactccagcctgggcgatgagagtgaaactccgtttcaaaaaaaaaaaaaggcaagacaatgaaatgtaacatgggatccccagtgggatcctgggacagaaaaaggacattaggtaaaaactagggaactctgaatcaattatggcttttttttttttacaattagtgagataatgatgtattwtttagtgaataattatcaataatgtatcaatattggttcattaattctaacatgggtctcatactaatataagatattagtaataggaggaactgggtgtttcctctgtaagatctcaattattctgtaaaccaagaaaaccttttatatgcaatctgctacacctaacatacagtcatcccttggactggttccaggatccccgtggacaccaaaatctgcagatgccctagtccctgatataaaatggcatagtatttgcatataacctatgtgattgtatccccccaaccatttttttttttctttgagacagggtctcactctggttgcccaggctggagtgcaatggtgcgatctcagctcactgcatcctagaccttctgcactcaggtgattctcccacctcagcctcctgagtagctgggactgcaggcacgtgccaccatgcctggctaattatatatacatttttwaatagagacagggtttcaccatgttgcccaggctggtctcaaactcctggacttgagcagtctgccttggcctcccaaactgctgagattataggcatgagccaccgcgcccagctgcgatcacatactttaaatcatttctaaattatttatcgtagctgatgcaacgtcagtgctatggaagttgttgttgtattgtttgggaataatgacaagaaaaaagactgtacatgtttagtatagacacaagaaaataggcctgcttacattttccatccatattggttgatccacagatgtgggacctgtgatacgagaagtttatttctggatcacataacagttcagtaggaatcacacgttggctcctcccatcttgtagttctgccatcccctatggcctcagaattctttgctgggtcatctccatccagccgaaggatggcggcagaaggacagtggagtaaactgtgggaagtttgtctgggcaggtctggaggtggagtgtattaattccacctacctcccctggccaggaccaaatcatgtggccacacctactcgcaagggaggctgggaaatgtagtctagtcgtgagaccaggaggaaaaagagggtccatgacctgctggctagaaatgaggagcaggaaattactcagtcacactaccagatcctccctgccacatcgcgtccaccaaggtggcctctgctaaagtgacatggttgaatttttgctcctattagggatggggtcaggagggcacccctcccactcgggatctaagtctcttgcacggacaggtgctgttgggcgcatgaccactgctatgggcggctggaggagaagggctgcaacattcgcacacagtcctacaaatacagattcgcgtggggcgtggtcacctgcggtaaggctggggcttcccrttcrggycattggaagagcacctgactttaagttcagctgccctagagaacagccagcctgtatcttgttgggggaggaggagttgggtgcagawctgggacgagaggagcaggattattgcagctgtatcagacccccagggtagggctgaatcatccactgggtgcaaaagtgcttgacatgcttcctttttcttgattcccccacaaaatacctgtagagtatgtttaggcttctccattttagacatcaagaaatggaagctagaaagcctgccagtgcacacagcaggattcaagctcagggcctctgagttcaaggctaaatctggggatggttctgctctatgagaatgagagttcctccagagcagcggctgcctccaccatcagactgggagtcccccagaggaaggaaggtgcttcctctatcagactgggaactccctgagggcaggagctgtctcctgsactgaaacctcaccctgagcagcagctgtgccccttccatcagattctctattcccccgatttaggagccatgcctcttccatcaggctgaaagctcctcggagcaggaagtccatggggtctctgctgagactggagcatgctcttcccaccctcattctgctcttggtgtccttttgcagagcccgggcccttctgccatgtgaacctctgtgcctgtgaccggaagctcgtctactgcctcaagagaaacctacggagctacaacccacagtaccaatactttcccaacatcctctgctcctaggcctccccagcgagctcctcccagaccaagacttttgttctgtttttctacaacacagagtactgactctgcctggttcctgagagaggctcctaagtcacagacctcagtctttctcgaagcttggcggacccccagggccacactgtaccctccagcgagtcccakgagagtgactctggtcataggacttggtagggtcccagggtccctaggcctccacttctgagggcagcccctctggtgccaagagctctcctccaactcagggttggctgtgtctcttttcttctctgaagacagcgtcctggctccagttggaacactttcctgagatgcacttacttctcagcttctgcgatcagattatcatcaccaccaccctccagagaatttttacgcaagaagagccaaattgactctctaaatctggtgtatgggtattaaataaaattcattctcaaggctaataaaaaccacattggcattttcctctgctgtgggggatcgctggtgcctctttctctgccactggggcaataaacccaaagatgtctacattatctccgaaacagaagggaagattagtaaatgcagggttttctgggatgagcttcaggctttctcttgggctaattttcttacaccttggggtcctctccagtattgggtctcattcttcctcgatggggtcagggaaagataactggtgattatgccagcttcagcttccaggccagagagggtggcattcaaatcccagtgctggcttcttcagctgtgtggtcttggacccgttactgaacctctttgactttcagtctctttgagaaataaactgtcttgttccttgcaatgtaaaatgagacttctaaagcccaccttgatgctgatatggagaatgctgaggttctaggatttcacacagcaggaatttttttttaataggtgtcagctgtggggtttattttttacaaagtaaggacattaaaaaaaccaacccgtctatcaattcataaaagaaaggatgttctgataccaagactgaaagaagaaaggatgtattccaaaacaaaggaacatccttccaagaaaggacctatggcttctttattccgacataccccaaaataactgcatgataaataggtctatatttaaaaagctctagtgtcgaatgttttcaaaataaaatttaattttatgagattaccctgaatgcaccagtgctttagaaaagtttgatttagactcggtgtctatatttgacaatgccacacagggagggacttaaatgctgaatttgctcatgaaatatttaaaatcaaagccatttcccagatccaattttgaatgggtatgtgggggaaattgaagtcttcactctaatcccattttccttcaattgtgatattctggatgacagagaagagaacccagtccagacttctcccttctcccatgggggtcaggtgggaggcagggcagtrttttgctggtaagttctgcaggagggggtgtgggcaggcccttctcattggcacatcccagctcagagtcccagcatccacacaggagcaggatgctatgaggttatgaaggcaacactacaggctggtgtgggattgagttggaaggaaccatggagaaccttcatttatctaccaagaaattgaggcccagaaagttttaggagactgtccaaaagtcacacagcacatcaacagcagaagtaggattcgatctcagatcctagctttaaactctgggctctggccactatcccacattgccttcaaccccagcccacaaaaggagcagttcagggagtcacccacattaggggttcgtcaggggaacccctggattccagctgagggccagctccatgtcttccctgctgcaactgcctctttggattctggaggctgtccccgggtggtcagtcagtctggggctctgggcttcatcctcagtggaggagatcccattgctgtcttccaccttggctgctgtgaacagctctggggaaattatgagagcaaagggagcctcgaaacttggggaaaggcgttctcctcaattgttgcatttgctgatcccttggctggcaggagaaccatcagggaggtcatcccattttaagaaagctagggaaacatacagaccagatcgcaatgcctccctagctagatctttatacatccttaatggacagactgccctgtacatacagatcctttactgtcatctgaattgggcttcaggcacaaatgtgagcctccaaacataagtaaaatgatctctataagcatatctacagaggggttgggcagcggggagcccccttgtagttgttaccaaactgaaaaagcctcaagtaaagcccactgatcaggatggaagggaggaggacagagctaaggtgggctgatgaggtaggaggtgtatggatattcttcttcttcttcttcttcctcctcctcttcttcctcctcttcctcctcctcttcttcctcccttcctcctcctcttcttcctcttccttctccttctccttcttcttcttcagatggaattttgctcttgtcacccaggctggagtgcaatggcacggtcttggctcactgcaacctctgcctgctgggttcaagctattctcctgcttcagcctcccgagtagctaggattataggcatgcaccaccatgcccagctaattttgtggttttagtggagacagggtttcaccatgttgacttgaactcctgacttcaggtgatctgcctgcctcggcctctcaaagtgctggggttacaggtttgagccagcgagtctggctggagtttcttctttgtgcgggacaccatgtagacattattaactgcccagtgaggctgctgttttcattcccatgtgatgggtgggacctgaggactgggaaagtgaagtgttttgcttgagaccacacaggtaataaggaagagaggtgggaaggaagcagtctgtctgatcccaaagccatgttctgtggtctctttttttttcagggacagggtctcactttgtcacctagctgcagtgcagtggcgtgatcataactcactacagcctcaaacccctgggctcaaatgatcctcccacctcagcctccagagttactaggactacaggcatgcaccactacaccttgataattttatttttctgtagagctgaggcttttgctatgttgccccggctggtcttaaactcttggcctcaagcgatcctcccacctcggcccaaaaccgtgttcttagtagaacatcatgcaggggaagcttggagctggggccaggtcttgcaacaggcactgaggaaaacacattttgttttgttcagggtgggtgtggcaagtttggattgtgtaactttagctaagctatgtttcccagaattcctttccctgtagagttctgggttaggttctggttagttgctgtagtttagggcccaaagagatgttttgttgagatttgggaggcagatgggaagtgcagtcatattctctttacacttgggagcagggcatgttgtgtttgtggctcaggcccatggatcatggatctgctggctcgccttgctggggcgagcctgctggatttctttaatttctctgactcttgggccagatgtgtgtttagctctgtaagtaagggagccaacttcccctgcagggtgcacaggcagtgaaactagggtggaaggtattgagacccatctgtttcttgtttgttcttttgggctccatgcatcctcccaggttccaatttgtccttgctctcccctgccccttcacacccatcttccgtttcagactgtctgccctgctaacttcaggctgtagcaccaggcacaggagaaacagcctcctatgaaggactaagccagcaatcccatccgtaccaggtcaaatctctaccaaaaaagtattgtcgtatgagagtacttctgcctttctgcctgaactccttaacctcttcagaatttggtactaggagaggtttctgaggaacagcttgaaggatgggctctttgaattgcatctggaattggttttcttatttgattagatttaaaggcataaatgactggtttttagtagtaaggggaacattgattgaccacagcctgaagagataaaacagctacttaaatgatcacctctgtccacacctgttcaagggtgaccaagtagttgatggcacagagcactttaatggaaacaaaaatattattatgggttggagaacttggaaaaagaaagtgatggtctcaagtctttaaaatctcactcaagatccacagacagggccagtcatgatggattacatttataatcctcgtgctttgggaggctgtagtgggaggattcattgagcccaggagtttgagactagcctgggcaacataatgaggccctgcctctacaaaataaaatctgcatacaggacatgaatgcttctttgcctgcctgtatggaagacagatgcctgttagagagacagtggagtactgcaaatttgatcaagcaatgcctccaatcacagctgctgtagttttgttgctggagccaatcaacacatcccctggcacctattttttaattattccactgcagaatgactttttccttatacctattagtaaaactgtcagaagcatttgctctcagcttgcagggacagcaatacacttacactttccaactgcaggattacattgactctccagctctatgccatcatctagtccagagggaccttgattatctttgcatcccacaggacgtcagcattggtgatgacatgtatgacatgtatttgccttaggggggagaaatcccacaagaattcaggggcctgctactgcagtggcattttccaggggttctttagtctggggcatgttgagatatccctttcaaaaggtagggcaagtcacagcatctggccctcccatctattgagaaggaagcacagtgccttgtgggcacttcagattttagagagtagctcatgtttcaggtcaaagtaccactgaagtaccatttaccagtgataccaatgaagtaccacttcaacccacttaccaatcgaactgaatagttgcttgttttgagtggggcccagaacaaaaaggtccaggctgccatgcaagtggctctgccacttgggtgtatgacccagcagatccaatggtgcttgacgtgtatatgcacatagagatgctacatggaagctcagaggggcatctgtgggtaaagcatagggcagaccttaagggttttggagcaaagccatgtcatcaactgcagaggactactctccttttgagaaacagtatctggcttgccagcaggtcttggtagacactgaatgcttgacctcaggttaccaagttatcatgagacctgagttgcctatcatgaactgggtgttaacaggcccatcaaaacaaagttcagcatggatagcagcaattgcataatcaaatggaaatggtcttgtgaaatcgggcttgaatagcttctgaaggcccaagtaagttgtgtgagcatgcccatggccctagtgcctgccacaagcctcctccttcacctatacctatgaattcatggcgagttccctgtgaccaattgcaggagaaagaaaaagacccgggcctgttttacagatggctctccacatatgctaccattccctgacagtggatggctgcagcattgcagccccatctcgggtgctgctgtttacataaggtgtatcagtgttgttaaccttatatctcaatattcaagtcagaggatatcaaaaggggattgtcactcaactagaatagaaatgagaaattgagatggataagagaactttgtatcctctatccactttggggagaggatagcttgttagattgtatacagggaaaactgcattatgttaggcaggaagatgatcttgctattgcctttatttgggagaggtgcatatgggtgccaagtcaacaaggggtggactcttgggggtttgtattatttcacttaactaagccaaagtttcatttcctagaattcccttccctgcagagttccaggttagcatgggtctcaagagatgtcttgcataagatttggaaactggtatggagtaatttaatttttacaatctcatagtcgaagcagggcatgaaatgctgttgcagccaatgtatgctggcccttatgtgctggctcatggtgttagtgcggggaagcactgggagctgcagcaactccaggtcctggcagaggatcttcagctcctcttacttcggagccaggagcatacttggttccatgatgaagggcactggcttcccttggaagacactgcatcatcaacatggaagacgtgggggtagcgagaggctgaagggtgtcgttgtctgtcctcatagagctctactcatccttgtagttccactctgcc

SEQ ID NO: 95746 - DNA, 23201 bp, Homo sapiens
ctagtttccttatctgcaaaatgagggtaataatggcacttatctagctaggggatgtgaagatttagtgagtaaatatatgtaaagtgctcagaacccctgcaaggcataagtgtgatatatacgttagccatcatcgtgggtagtattagtttgtgccaggcactgataagaaggcactagggataaagaggtgaacaaaacagacctgacctctgtccttaatgagcttgcaggctccatccatcttattttctctatggggaggaaagccaaccagtgtttcattactgttgataaaagctgaattgatgggtccaggaaaggacccagatggtggcgtctagggaccctgcaacttactggctgctgccctaggggctggcgtgggaggccatgccatgctttctacattcttgcccctcatcaagcctcgggccctcgggtcctgtgctcttgctttagcttcagcacaatcgtaggcagccccaaatgacttgtcaaatggagagaaccatgcctgagtcatagctgtgaaggtcagtgcatgaaaatgccctcaaaccttcaaaatgccacacgaacaagaggtctaggcagggagactggcaaggagaaagagcactggacttggagaaagggaccagagtttaagtcctggcccacttcatagctgtgtggattttttcaggttacttccgctctctgagacttggtctcctcctctgtcaaatgtgaatgtgatagaacctgcctggtagggttgtagtgaggagtaaacaggagcagagcataaacttaaggggaatttaaggccttctcaaataccacctctcctgggaagatttctgtgaccttcccaagagagttcactgctccttcctctgagctcagaggcatttatacagtcactggagcagtgcttatcattccacatggatgcaggctgagctccctagaaacagactctgatgcaaaaaaagtatgttgctgggaggctccaggagatacagctgtagggaagtgagcaagggaagaatggggagagggagaagctgacatgcaagggagaagctgacatagaaagagaagctaacacacaagggagaagctggaacagagggagaagctgacacataatggagaagctggcacagagggagaagcatacacacaagggagaagctgacatagagggagaagctaacacacacacagagagaaactgacacacgagggagaagctgacacagagggagaaggtgacatacaaggaagggagaagctgacacagagggagaagctgacacacagaagctgacatagcagaagctgacacacaagggagaagttgacacagaaggagaagctaacacacacacagagaagccaacatagagggagaaagtgacacagagggacaagctcacacacacacacacacacacacacacacacactgacatagagggagaagctgacacacaagggagaagctgacacacacagagagaaactgacatagagggagaagctgacacagagggacaagctaacacacacacacacacagaaactgacacagagggagaagctgacacacacagagaagccagcatagagggagaagctgacacagagggacaagctaacacacacacacacacacacacagaaactgacatagagggagaagctgacacaaaagggagaagctgacatgcaagggagaagctgacacggagaagctgacacacacacagagaagctgacctagagagagaagctgacacacaagggagaagttgacacagaggtagaagctgacacacacacgcacagagcccaacataaagggagaagctgatacagaggaacaagctagcacgcacgtgcgcgcgcacacacacacacagaaactgacatagagggagaagctgacacagaagaacaagctaacacacacacacacacacacacacagagaaactgacatagaggggaagttgacacacagaggcagttgctgaggccacagggagctctggggctgggaccgcctttcagagctatcctgaaaaaggcaagggatggccctttaaactatcaccccagccagggattggctagagactccttctcctgtcttccctgggaggggccataaccttgggccacgcggtacctgcagcagagagtggttctcagtgagggacagcgtcagcagcagctggtaccccagccctgaagagggggcctgccaggactgtgtgaagcattcgagaactaatggagaaccaaacagaattgcagcccacatggggctttggggctatatttggtctctgtttacctatttggtctctctagccagcttggcagcttccttgggtcagaatgttctcattagaagagctcatagttggtgcttaataagagtctatcggatttcatgaccagtaatgcacccaggtccctttctttgtttctctaaagtgtatcacctgctcattcaaaagaactgagcccctttttcgtgggctaaacttgcacatgattttttttagactcaaaagagaaaaaggaagcaagcctgtagagacagaacctaattaaaaaacatcccgcacagcaattgaagtgaaggttggctgggaccaggcctggtcagggcccgacctcgcagcatccaccagaatgttgccaaagggggaagatagcaaagacaccctgattaactctcccagggatctgcagcaggatggtcattttgaagttttccttggaagctttgccaccaggtgtaaatctagcccaagctctgcacctgccaacttctctaggctcaaccgagctattgtttcacactccaagtcctgacgttaccagatttagcctgatttatgatgggggctataaagaccacttgtatgtaaagaaagccattggctgatccctggcagctccatggcagggctgcaacccacattcttctctactgttctaatatgggtatcattacccatactaatcggaatatgaattctgtgtctacctatgactgcatttgatagtacaaaacagttttactttcattattccagcaggtcccacaatgggcctgtgaagtagacagctatgtgatcatgaggaatttgttcaccctctctgggtctcggtttacccaacttcaaaatgataatagaacctcagaaggagttgtaagggtcaaaccatgtaatacctgtgaagcccttaaaataaaggcttgaaattattgacaggaatttctagtctcactctgcaagagaagaaaccaaggtgcagagaggtaaagttgatgaatatgatgcctgggtatcaaggaaggaaggcactgtgggactagatgcaaaccaagctaggaattcctgtgtgggatttctattatgaacaacataggtgcctttccaactcgggaacagaggaaatatggactcctcaaaagaaaaaaagaagagatgaagggatgatgttgccaaagaaagaaatttggaaaaaaaaaaaccaaaccaacatttgcactttcaaaaccatggaacccttcttatttttatatgttcagatctaaatgccagaaaggttaccacattcaaagggaatgagatttgaaaatgatttctttgagtcctctgctgaggtctttccaaggcactacaattagggctttgcacccaaatacccttgcctcattttggtcattttgtcctggaacagaggttcagctgggagacccctcacacacaggtgaaggcgtggctgtagaacctcagaccccctggtctcctcaggaatgaaggtcattgccatcctcaccctcctcctcttctgctgtaagtagagagcttggtgggtcagcaccaagcttctgtcttcctgtttatgtcagtgggaggggggactctccaggtggcaccaggtgagggaagtcacaagtcccgcagaaaagaatcaggaaaggaacgggctcccaccaacgtcctcttgcttctgtttctgctataaaatgggctgatcccagtgttgggatcttataaagtgtctaggaaatcagaggttgccaaccatttgctagaaagggagtttgactactattttacccccctcaccctcaagagtcttttttcctttggatgctagtagcctttatttaaggccatttggattcagaacaaaaatgcagacatatatccagctaatttaagaatgattaatgcttatcagaaagacatttttatggtgacttatgggataattggtagttataagtcattgctgccgggagatccgattgcttacctctgcaaagtgaagaaagacctactgggaaacagtttggggtctactggagactgatagactcttttgctggattcgttgagtggaggtttgtccagatccattttcctgtctctttcaattgagtcacaataacttttgagtccctaagtcaaagatgtcaaaaacagacttcctttccccacagtgagtggtggaatttacactttgcaaggtgatagtgcaggaggatacctgtacgcagggatgaccgcctctgcagcccctcagtgcggctccagggactgcttgggcagcagtgaccgcccatgggtttcttccgccacacccccgtttagactgaacacgatagtgagatcgaaggcacctgagaaaactcccccaaactctatttctgtttctcttcttcaagttcatgtctttgttgtatttttattgcaaatttactacatgcttatagttaaaaagtaaaataaatgagtatatagcaacaaggtaaagctcctcctcatcctccccagaccccagttttttccctacatccagatgtgaccactcttaagagtttgatatacatcctctatacagcgtttacccacacacattcaaaacaccataataggaagggaacacatgctgggccgggcgcggttgttcatgactataatcccagcactttgggaggccgaggcgggcggatcacctgaggtcaggagttcgagaccagcctggccagctggccaagatggtgaaaccccgtctctattaaaaatacaaaaaattagtcaagcatggcagtgggcacctgtaatcccagctactcaggaggctgaggcaggagaattgcctgaacccgggaggcggaggttgcagtgagccgagatcacaccattgcactccagcctgggtaacaacagcgaaactccgtctcaaaaaaaaaaaaaaaagaaggaaagggaacacacgcttattatgaaaagacatgagacwgcggagacgtgtataaaatgaatgttgcctgtttctttctctctcttcaatcccaattgcctagagatagtgctatcaaatgtagtttatttttgagacacataattttgttattatccccctgtcggtggacatgtgggtggtttccaattttttgatatcacagataatgcttcaggaaaccattttgtgtatgcatttgtgcccactctcataagcatcttgtagaagcaaaaacagctgagttcatgtgtacttgtcatttaaaaaaataataattgaggatacctttcctgcctcttaagtattttgtttctcctgtgagatagtaaaggcctgatgacatctggagggactggcgtttctggctttgaacttttgccattcatgttgcatcagacccgagggtgttctgcctagaactgtggtttcttgctttgagggggaagactatggttgatgggaaagccttgttctgaacctcatggaaactgggtattcatctgggttagcaaaaaactagctgtgttacaggggcaaatctgaacctattttattccccaggaaagaggctggtgattccagccatgccccttgcacttcgctttggggatctggtgatatttcgaatgctcagcactctagtaaggggaggggacatcaaggcagcatcatgctcattgcaacttcyttcttcctttttttctcatcggtggtggcagcccccacccacagcagtttctggcagtttcagaggagggtcaaacacatcacggggcgaagtgccttcttctcatattacggatatggctgctactgtgggcttggggataaagggatccccgtggatgacactgacaggtgggtgcagaggctctaaggccacttatcatttgttttgcattaaagttcatgctcraagccagagagagggtgttaggattcttgcctggcaaataacagaaaacaactcaggctaatggaaggaagaactgaacgggatttggaggatgggtcttgagaaacccagggtcggggccagcttcttgagtgtgtgacctgtgaagtttcacagggcccaacactcataagggtcagggccagcttcttgagcgtgtgatctgtaaagtttcacagggcctggcactcataagggcctaaacatggtttactgctctgctgccaccatcttgaaattcttaataaagggcctcatgttttcattttgctttagtctctgcaattatgccgttggtcctgcccagagctctagaagctgtttcatcctcatagtaaaagtgctgtgctttcagctctccagcttttaggactataggcacagcacaactgactcactagtcctaattccatattctaggagagggaatccaagtggcccagtttggagaagttgtccatctgggtgaggttgcatggcacaaacctggcttcaggcctactccaaaggatgggggtgggggagtgtgagttcctagaaaaagtagaggtgggtgtcatctggtgaatgtacgtgtggggaggtaagaaacgggacagtttgcgtgtcaattcatttgaagacataagaaagcaaaatgttccttgccacatttaacctagtatggagaaacatgtccccacagtggggccttaaatatcactcctggagctcgagtcttgtgggtggggctcatggaaccatgggaggacctcagagccttggaagggcaactgacgcttatgaaatgcccttatgtgccaagcactgggactggcgattggcatacaaacctaatttaattctcgcagggaatgcacgagacagtgataccagcccatttgacaggtgaggacagtgagttgctaaaccacctcctaaaggcaatgcagcttctaagtggcagagttaggattgaacgagaatttgcctatttcaaagtttgtcccctctccttgatggtctgtgcctcccctgtcaaagtccaaaggctgattagaaattgaacatcattagccaaagctgatcaacagcagagcccccacttgcagatgggaatggtgagagagggagactgaaacatttttcttggcctttcaggccttagaatccaagcttaagtttctgccttcctgtcccttgtgtagtggttgaggacatggactgagcccatgctccagatggtatttctcctccagtgctctcccatccagcccccagccaactctgggtgccatgaatgggactacgtcggcttttacagacagttgtctcctcagagaccgttacagtgcctgactcacagtaggtgctcagtaaaaagtgttaaatgaatgaatgggcctaggtttgtgtcctgggtctatcattctccagctgcctaagtttgggaaattggcctcttggaatctcagtccctcycctacaaaagggcagcaatgattgtactttataggtttctatgagtagctaatgagatagcaacagatactagagagggctcaggaaatgctactggttattattattattttttattttatttattttttgggagacggggtcttgctctattatccaggctggggtggagaggctcaatcagagctcactgcagcctccgtcacctgagctcaagcaatccacccacttcagcctcctgagtagctgggaccacaggctggtgccaccatgyctggctttttttttttttttaaacttaaaaaacataggcggtctccctatgttgcccaggctggtctcaaactcctggactgaagcgatcctcctgccttatcctcacaaagtgctgggattgcaggcatgagccaccacacctggcctatgtttaatattattgataattcacctcctcaccttcaatgccttcttgcctagaggaggaggcaggtgagccctttctagtccccagataaggtcctccagcagattcctgagggacccacttccaggcacagcccctcatctccctctccctacgagaagctgaaggagttcagctgccagcctgtgttgaacagctaccagttccacatcgtcaatggcgcagtgrtttgtgagtagccttttctgtatggaaatgtcttttaacctgggcctttccttaacgttcacctcctctttgacccagagatcttttagaaaatgaaatgcttccaagtgcttggaaggagrtattcctgagctttctcctgatgctccagagcttctcagagtgtccgtgctcatcctgccctggtctctcccacccatgagtgtacctcctgaactctctgggggcccagagcctggcagatagtacatgctcartaaatacttgttcacttgagctaatcttgaagcttcccttgacaactgctgctgttgagaacatgtttccttgtttctgtsattttgttaacaaaacggctcagctgtcttccagttgracaaatatttattaagggcgactgcatgccaagcactaagataggtgctgccagggccacaaaagcaaataggtgggaagggaagggggactcacatgttactgagaccattcaaggagccatgtgggcaagtggatcaagtgcccttcacatggggcgtggccctggcatccggagcgtgttctgcggctggtagggtatgggtatgtgcagggcaatcctggcctagacagcaggcacatttggaggyacgggacagtagtctttcgtgagcaccatcctttccagcatagccagggtggatcctggggtcctgggctgggagggtgaagagcaacaaataaagaagtggcttcttggccgggcgcggtggctcacgcttgtaatcccagcactttgggaggccgaggcgggcggatcacgaggtcaggagatcgagaccatcctggctaacacggtgaaaccccgtctctactaaaaatacaaaaaaaattagccgggcgtgatggtgggcgcctgtagtcccagctactcgggaggctgaggcaggagaatggcgtgaacccgggaggcggagcttgcagtgagccgagattgcgccactgcactcccgcctgggccacagagcgagactccgtctcaaaaaaaaaaaaaaaaaaaaagaagaagtggcttcttatagtgtgtggctcacttcctgcctggcctcgtggggttgcatgaatcactttccttcccaggtgtatttattcagagctgtgagtgcaccttggagttcctctgtttcctcctgaggtcagggaactaccacctctctgccactcatcccctakggcgggagatacatcctccatcccgtagtgggttccagggctcagaaccctggtctcctgagctcccccaacccaccacttcagctcagcacacaccaatacccagagttaggactgtgaggtctccctggcaccagctgtgtgggttgggggctcggacccctgcaccgggaggacctgcctcagctcttggcctgccctgcccactgccaccagcacgtggttgacagggaaagaacccccttttgttccccacgtgagctcaaggagacttcctgagttggagctctctggtgtggtccttctcaggcctaaagcaaagtgtcttttctgtgacacctccaaggccatgttcaggagaggggaagggatcagggcctggtgggagggatggggagaggggactggagaaggtggcctccagggatcgagtttcccatggcctcttcccacctgtctttgccacaggggtggggacacctggctggcccagcccaagcctccaccctgggctcctgtgggctggctgcactcgccagggctggcctaggctctctgcacccagggaagcttctctattcaatgctcttcaccctcccagcccaggaccccaggagatgagggagagtggagcaaaggttgaggagcagaggctggagccccaggcagtggcactgctgggcagtggtgggaggtgccagccagggctgggagttggacccgaaagtacgtggcctgggctgtactttcttcccacgttgccccttcagagcagaagcagccagttgctcctgaagccttgaccagggctcctgagtccagagccttgctcagggcactagcgtgggaggaggcttccgcatcagtaccagggcatcagcacccgcctcctcagctgacccagcccgtgaggaccaggccagcccctgtcatccccacccccaccttgccaagcccctgcccccaggagcagggctgagagcgaggtgatctgggttctaatccagagtctgctgctgacatgtgctgagccccaggcccattggtttacttgccccagtattgagcgagcatccactgggtacccgcccagtgccggtgctgtgccaggggccaggggcacagaataaagcagacccagtccctgctcttctggcattcacagtcttgtggaaactccagagctaaagtgcccttagagattatccagatcagcccctccttgtagcaatgaagagactgagacccacagaggggatgagtttgatccaagaaacagacaagattaagatgcatgtgtcttgaaccttttcagtgctctggaacataccgtctggccggagttgtctgggctttggttttcccatccatgaaatgggtacaataacaacagctatagtgtatgagcctctgtgatagatgctgtacgcacagcacctgaactcacatgataaaccactgaggtgagcattatctcccattatcaaggaggaccctggggctcagagaggttaagcacgatggccaaggccacacagccagggaaagaagagttggaattcaaaccccgggtgccctgtctcacactagcttcccctgtggagggtgctggtgtgtgcatgattggaggccctcacacagtgtaagtctcaggatctgcagcaaactggtcagaatgctctgccctggcccagggaaggaaagaggggcagatggagtttgcttcgctgtaaggccccggagctttgtgttcctgctgagaagcctcagagtcgggcaacactgggtctaattccagctccaccccttgtattaatagctgggccttaatctcctcatctgtaaaatggagagaatcgcctgtacttcataaggctgctggaaggattagctaaagcaacccagctacagtggctggcctacagtaggtgcttcattaatgcccttccttttagatgtggaaattcctctttttgtccaagttttcttttcctctttgcttacggcactgggattttctttattactgtttctttgaagagtccgctctgtacttgtgcccatcgggctatggtcagtaaccccttatggaataaaacccctttcctggccaggtgtggtggctcatacctgtaatcccagcactctgggaggctgaggcgggaggatcacttgagcccaggagttcgagaccagcctgggcaacacagtgagacccctgtctctactaaacatacaaacaattagccagatgtggtggtgcatacctgtagtcccagctactcagaaggctgagataggaggatcacctgagcccaggagatgaggccacagtgagctgtgattgcaccactgcactccagcctgggcaacagagtgagaccctacctcaaaaaagaaaagcaacaacagaaaaacctatttccctatcctrattgcacctccattcaaagagctgcccctgcaagagttaaccaactccctagcctcccatgagttctgaaatcctgcacccrggcctggtcccaggttgcctagcaaccgggggctgctctgggatgcagtaggtaagcaggggagggagaggaagaaaacaacttggtctgtccacgactctaaatgtcactgagagatcagtgcagagaaaggcctgtcaccagagcccagggcccaatttgcctggtggtagggacagctgccctcaggccacctgggaggtggttatccctcctttgagtgggcttacataagtacttggcatttttgcaagggactttaagctcactcagcagtgacaccccctccgcccacatgcacatacatgtgtggtacagggaggacccggtgtgggaggcagagatggggttccagccaactgaaactccatcatctgcatctcccggcctctgactgcctccctctgccaaagcgggaagatgaaaatggtaactgctggaatttgtattttgcaaagacttttctcatttactgctgaatatattcctcatctcagcctccactcgctgacacgctacccactgtctctcccagcattcatctctacctgaaatgatcttgtttacttctctgtgtctgtgtgcctcgactctcccccaccgactagaaaggtccgtgagagcaaggagcaagcctgtcttgtttgagggcactggttctcatagagcccacagggaatgatgcccctggactaagcagtgtggggtctgctggcttgcacctgtgcccccagctcctagccaaagaccagacacatgttgggaactcaatacttgtttgtttaatgagtagatgaacaaaagcactcatgaaataggcagtgcacgtatctttatcaccatttgaaagctgaggaaacaggcttggagagggaagcaacttgcctgacaccccaaagcacagaagcagcatatttggcccaagaacctggcttcctgtctccaaggggtcagctgctggcattggcctgtaggccatgtgagtgtggcaatgtagtcagcaaagagcctttactgcatgttggggtcagaagatcagcaataaggaggacaaaatccttgcctggaaggagcttgtgttccaaaaagaacaagagaccacagcatattcattaataaagacacattcaaacagggccaagtgctctgaagcacctcagacaaagcgacaggctgcaaaatgacagcgtttgggggtcaggagacagaagggtgcctgctttaggtggtcgaagaaggcctctctggggaggtggcatttggtctgagacctcagggccaatgtgctaggagcagaggagccttggggaagaatggagatgaggttggacaggatgagacacgtgccttctatgtcaatggcaagggagtcattggagcatgtgaagcagaggatgctctacttttgccccagaaagatcactctggctacagtgcagagaaagaagagagtcaaggaggaaagaagggcctcattaggggactgttgcaaagcacagggaggcacaaccacagccaagatcagcatggtgacaatggggatgggaagtgtcagatgtcggcaatgctgtgcgggtagggtcagggccgacaggacctgctgatgggttcagcgtggggtgtgaagggaacagaggctgcaccccaggctcctggcctgagtggctgtagatagtggcaccaaatactgagctygtgaagatggggggagagctgatgatgaagacagcaagagtttggtgtgagtcaccttgagtttgagacacgtgtcagacatgtaaggggtaggcaggtggacacgtgcttattgaagtctggagcccaagggagaggtgtgggctgcagcggagaagttgggagtattcagagttctgacactgaccaagaacacccctcagagaattcagagacaaccagggctgaggcgaggggcttagactggggcctgggacagccacaggcaggaatgcagacttgctgcctcttcttatttgtggagatgtagttcatgcagcaagaaagtcattccaaagccctcctttcctttcttcatgcctcagtttctccattagcacattaaaagatgcaagatctggagttaagcttgtttttaaaaggtggcctccaaagacggtttttcttggcctggggctgtctcatcatccaggtcatgacagrcccggtccatggttgaggaatgccacagaagtgacagtccactgcaaaagactgctgctccagatcagttctggaaggcctggcaatggggcaggccactgaagtagaactggatgtcagatgcacgcattagaaaggacaggaagaccaaatgagaaagggagagggggcagggagaaaggaaggagagctagagacttgaggcaaaggaaacaagagatggaatagaagaagasagaggaccagaagacagtgagaccaacagaaagagagagggacgagaaagaaggtggctgaggaaggtgagaaaagtgtttccagggcgacagcaactggaccaggccctctagttggacagtgaggctggctggggggcctgagctcaagtagccctcgtcccctgagagagtgggggctacctggggagctgggcttgatgcatctggaaggatcttcacagaggcaggagggggagtgggagggcagagggcacccaggcgctagaacagtgggagtggcgggagccgcaaaaccggagagccagaggagtgaacatccctggcagattccctgcgggcgagcagggagggcaggaagctcagtggtgttggcacaacgtgagaagttccagggaggcgtgggaggacggcttctgcaggacgcagactttgcagagggagagtggcaaacagactgactgcaggcagctctgccggctccacagggcgctgctttttctccacgtggagctggagtgcatcaccctgagaacagcagcaagcgcccacagggcaccttctgcgtgccaggcacatccggaccacttgtcggtagacaccagtgaccctcaccaccaccccaggaatgggacagtgtcatgtgtttctgaaatgactaggttttagcaccatttcatagatgaggaagctgaagctaacttgcccaaggtcataaaccgggcgtctggtggcctcccctcctcactgccaaccctgagagcggactagggtggagttatctggaaagaggaagctgtacctgagagccctaaacacacatgcgcgcgcgcacacacacacacacgcacaaacacacaatgcacgcacacacatgcgcacgcacatacacacacatgcacacatggacacatacctgcacacacaagcatacacatgcacacaggcacacgcatgcacacacgcgcatgcacacacatgcacacacatgtgcatgcacacagtgcgacagctctgattagtaggtaaataaaaggttcccatctagtggtgactcggccaaagtgcagacactgaaccccaaaggcccatagaggcttcattcatcccttctcttattcttcattcatggattctattgagcatctgctctgtgcagcatctgtcctggatgctggggatactgtgatgacttagacaaggtctcagccgcacacagcttatgcttctttgaggggaggcagacacaagccaggaaaccaataagagaagttaagtaaaaagcacagtgagtgagacaaacgggtayggaggacatggccagagagagctttagttcaggtggtcagggagcacctctctgaggaggtgaaatttgaccaagcctcaaacagtggcagggatcccactgcttgcagatcctggggagaagcattttagacaaaaagaacagcaagtccaaaggcccagagacaagacagagcaagacctgtgacatgaaacaggctggtgtgcccagagcagggaggctgggagagtggagggggagggcgatgagggtggagaagctggtgagggtggcatcccggcaagtgtgcctggccacggaggccacggaaggattcagcatgtctttcccgaataggaaaccacactggggctgtaagccagagagtgaacgtaactcgggttacagtttgagaaggtccctgcttatttccttccgtgaaggaggaagagctgctgatgacagagatttgggcagtggccaaagacatagagagaagagggcagaacatgggctattttaaacacagagaagattagcgggacccgctggcagaccggacrtgaaatgtggaaggagcgggggcagcgaggtcggctcctagtttcctgagaatgtgggtgaatcacgggctcacaggcagagggagcactaggatatcaagggttcccttgtgaacgcctcaagttggagatgcctgagacatccaagtgagatgtcaagcaggcagctggaaataggagatgagctctgggaaaatgctcccatcaccctggcctgtgtgctgcctgggcgcacccattcagggccctccacgcagcccacgcccctgcctcctgattccttctaggcttctccagcactcgtgggatgcccagatgtgatcagggaagggcttgaggatgcagggaagctgtggctgagagccctaaacacacacatgcacacgcacacacacatacacaggcacatgcacacacgaccatacacacacacaaatgcacgcasatgcacacaaatgcatatgcacgcacacaaatgcatatgcacacacacacatgcacacatatgcatacacgtatccctttcagtggctttcctttctgtccttaacccttggccccttacagtgagctcccagttctccccagccttaraaccaaaccctggggctgggctgggagcccycagtgaccctctgtgtctctgtaggtggatgcacccttggtcctggtgccagctgccactgcaggctgaaggcctgtgagtgtgacaagcaatccgtgcactgcttcaaagagagcctgcccacctatgagaaaaacttcaagcagttctccagccrgcccaggtgtggcagacataagccctggtgctagggacaccacagggtccctctcatcatccagcatccgctctagtgttgctcttccaggaagccttctcagatcatccccaacaggcccctgttcttccactgggagggaggacaaaatgtctcccgcagggcagctcacccttcagcattctgaccaaggggactccctgtcgttcagcatcagagggctggagagcagaaatgggaaagatgagatgcctgccctgcaggagctggcattctgtggagtggggaggactacaaatgcatggatatagaagtaagagacacattagactgtagtaagtgctatgatgcagtaaaacaaagggacgggatagagatgcacccaaccccacatcccagggtttccaggaggggagaagccccaggatctaccccaaactctctcttcacccccactgcaaaccgggacacagagcagacttgagcgccaggcccatgcccagctctagctggcaacaaagccaccactttccttgcccctctgcgtcctcagtttttatgatgtcattcttagcttttcttatcaagaggcagaatctgttttccccatcccatgaatctgaactggtcttgtggcttagtttggtcaatagaatgttgtgggagggatggtttaccagttttgagctaggcctcaggaggtctagggcatgtctactctctcttaggacagctgcccccaccctgcaaaaaagcctgggctagcctgctggaggatgagagcccacctggatcagttgtctcagctgatttcagacacgtgagagagagctcagcgagactcagcttgtagctgactacagatgtgtgagggaacctggctgagaccaaaacaactgtccagctgagcccaggctaaactgccaacatgcagaattgtgagctaaataaaggctgctgttctaagtcactgggttttggtatggtttgttaggcagccataactaacaggtgtaattggtccttattcccttattcactgagagtgatgggttctcagccctgagctggacttggaggccatggaaatgcagtggacatggcctttgttccttaccttgaaggtgtggaaggaggtcaagttcatggaataatggagaacacacagctgtaatcgtttgcttgttcagggaacacacatttattgagcacttgctatgtgccaggcacagtgccaggcagtagggatccagatatttaaagaaaacaaacaaaaatcaggtccaaaactcctggggagaatgctgagagtggtatcagcttttaggaattcagacacaaaatctggattgaaaaatggacagatgtgaagacagaaaaagacaccagatgtggagtgtcagtggagggtctgggggcccaggctcctgcgctctggctggctcagcttgtactatcatgtgggtgactggcctgctcttctgtcccacacacatgggtggaaattgcaactgcagatgggcagcttgaggtttacgaacatcagggagactgtaagccggccatgagggaagcagctgtagaaaggtgggcatggaaccaaggtggccaggcccaagccagcaggcacccccccaccttggggatcctgaccactgcagagaccagctccagactgtgaaggtgcctggctgaccgacacaatggaggaagaggggtgagggccaggcttagggtgggggatagggttcccgtgtgagatccaggccgtgtttttaaaaaaaatttttgagacagagtctcactctgtcatccaggatggagggccatggcacgatcgcagctcactgcaacctccacctcctgggtgcaagtgattctcctgcctcagcctcccaagtatctgggattacaagcgcccaccaccatgcccagctaatttttgtatttctagtagagacagggtttcatcatgctggccaggctggtctggaactcctgacctcaactgatccacccacctcagcctcccaaagtgctgggattacaggcatgagccactgcacccagccccaggccatctttttcactccctcctctcttccatcccctaaatctataagacagaaatgatgggcccttgatggtatgcaagccccatttgtttggcattgatgccctgattcttggagagctgagatgggagtgtagaagaatgggcagactctctctgggaaagcctactgtcctcgaagggaaatcatccattccatgagcacatgttactgaagacctactccaagccaggccctctgcaccagactccacggagctcttggaccaaagggaaaacaagtaagcaggggattgcagaacaagctgggggtgccaggattggggtgggcatggggagcaatgcccacctcctggaggatgagggaagctttcctgaggactgctgggggtctgacatctcatctgagacttgaagatgaggaggagttaggagggccggtggggccatgcagagcctcccaggttgaggtctggagaaaagcagcatatgtctatgcaagctccttgtccacctgccttgcccatctctgctgaaggctctttatcatttgtccctgcagcccaaaaacctgggtgttgaattatcatattccacatcccacacccaatctgttggcactaccttcacaatgcatctagattctgtatttataaaatgcttccatcaaatgtttacatggaaaaaaaaaaagagagagrggggaaaaaatctagaatccagccacttcttatgactttcactgccgccttcttgggtaggagccaccatcactggtgccaccatcaccgtcactgcagctgctctctgctgttctccctgcccccaccctcggcccctccatctcctcctcacacagcagtcggccagcagtgactgagcctggcactctctgctcagaccctcagtggctcccactgggctgtctttacagtgccaccccttcaagtctgggctggaatcccaccttcttgatgaggcttatgctgaccaccctattcagtcctgccctctcccaccggcattgcccatcctcttgccctcccctttattcatctgatgaaaacgggactggggaggggggcggactagtgacttgttgcagggcaccagctagtgcccagcagggctggaatgtgaacccctgtcttctgagtcacaatctcttacttcccacccactttctcaaaatgaggaagctggatctgatgccctctgagtctcaggctctggagttggagttcaaatcctgcatttgttgcatgaccttgagtcatttacttggctcctctgggcctcagtttcctccctgcagaagcaaagctatgaatagtccccactgcagcaggatgagctgtggacaaaacccctcagacaccaggttaaggaaggatttggctttattcggccaggagctttggcagactcgcatctcaacagctgggagctttggcagactcatgtctcaagaaccgagctccctgaagacagagttcctggcccttttaagggcttacaactctaagggggtccacatgaaagggtcatgatagattgagagcacatgtggttagagtggggggttgatcttttaacctcaggcctggtcatcagtggcaccggctggtcttgccaatgacttcattcctgttgtttttcaacttttacttcctcctcctcttcagagacaggagacagtaagagaaatggcctcacttctcattcccccctttgagaatctcactcactagtgggagttctcactgtcatcttcactacccaggtcttccagtccagttccatcaattcctagagttacatactctgttttccaacagggataaactagttccaatgggttatagcacacatcaagctggtcacttcttgggctgcatatcttgtactgggtagcattatacacacaagtcccttttaaacagaaagtctgttttaactttttgccctacctcagtctgaggaaggtcagttgaagtccttactgtacaagtccaaaattttaggaaaatgagtcccacgatgagtttcctcatgcttcagccatgcacggaccagtcagcttccaggtgtgactggagcagggcttgtcatcttcttcaaagtcatcttgcatgggttgtccaagcttggtctcacctcccaggtctcagatgctttaggttttacatggctgtggtgaatccaggctgggattccttctacctttatggctgtgggagtggtcaagacgatggtctggggtcctctccaccgtggctgcaaggaggctatgttccaatccgtgatccatacccgatcacctggggagaaagggtgaactggggagaataagctgacagagcacctctcatttacccaggctgaaattgtttgtgtaattttgcctaaagcctgtagctgttgctgtaagtcaatttcacctagctctcgaggagtgcctgggagtccccatagtctgggaggggggcctatgatataatatttaataaggggaatatcctgttcttttagaaggggtacatctaatcttaaacaataccatagggaggcttatacccactttaatcctgtttcttgacacactttccctaaactatttttgatagtctgattcatccactccaccttcccagaactctgtggttggtaagcggtatgtagtttccatgtgatccccaatacctttgctgtcttctgtaccaactagctacaaacaccagcccattgtctgagctgattcgtaagggcagtccaaacgtagggttgagatctcggagaagcacacaggttacttcacaagctttcccagttcgtgttggataggcctccacccacctagagtatgtacacactagaactagcaaatacctgttacctccacatttggacatcttggtgaagtctacttggagatcttcaaagggggctgctccataagcttgtatgctgggcgggacagttggaccttgcctagcattgtgctgctagcaggtgacacactgctgcaccactgttttggcaaaggcttacagatgtgagatgtagaagaactggcccaacaacttttcaagtggctcttggcctatgtgcgtggtctcatgcatagccaatatgactgcggctcctagcagttgtggtatggctattctcctgtccgataaccagatccatccctcttctatcacctgtcctccctctgcctagagaaagtccttctcttctttagaataagtaggtacaaggtcaggtgcctgagggaataggggggctgtgattgatgcccagaagggggtggatgctacttttcaagcctctgagtcagcttgggagttccccaaggcaatcgaggtggaagctcgctggtgtcctctgcaatgcatgactgccaccttttggggcttccatactgcctctactaactgcaggatctcttgctggtactttatgtcttttcccccagatttcaatgggcctttttctttatataatgccccatgcacttggagggttaagaaggcataccgagagtcagtataaatatttacagtcttaccttcacttagctctaaggcccaaattaaagcaatgagtttgaccttttgggctgaagtatcctggggcaatgatttggcttcagtgacagcatccagggttaccactgcatatcctgcacacctctctccttgtgggttgacgaagctgctcctgtccatgtacagctcccagtctactgatgtccaaggatggtcttggaggtcaggcctgctagaataaactgtgtccaacacctctacatagttacgttcgactgggctctctgacactgggagtaaggtggtggagttcaaggtgttgcaaacttcaatggttatgcagggattttcacggagcaagctttggtacttagttagtctaccatttgttagccaatgatg

SEQ ID NO: 95747 - DNA, 15311 bp, Homo sapiens
  misc_feature (1)...(15311): n = A,T,C or G
cacgttactacagcagctgaacagcatttaacaggacagaaggtaaatgttcatgagggaaaacctgtgtggtggaaggactttaaaacaaagtcctaggaaagaaggagagttataacttggggaagagggtttgcttgtatttccccaggagaaaaccagcttccagtttaggtacctacaagacgtcttaaactctaccatgagcaaaattccaaagaagagaaaaggattttggaaccaagatctccacctcccagcatgcctgatggctcgaatgaatgtttcagccgaccagatgaagaccaacaaaacccatcaagcaagcccaccgacttgaggacagatcaagaggctgacccagcttgcagaaaaaaaacgaaaagcacaacaaaaaccactaaccgcaagtcacctgatggtggctataattgcagtaattactatggcggtaagtctccctgtggctacagcagaccaaaattatacctattaggcatatgtcccatttctgcctttaattaggcctatcacatagttggaacccccagttgaggtttatattaatgatagtgtttggatgcctgagcctacagaccctcgtgggccctctcacccagaggaggaaggaatgttaataaatgtgtccatgggttatcagttccccgctctttgcatagggccggctatcggttgcttaaaaggctactgacaacattggctagttaaaattccaggtcataatcaaagaccggtatcctatcatttattttctggatggagcccagatcattcacaaagtttggttcaattaaaacagttcaagcccagaaaagagaggtgtcaacaacctcaacaatggtcaaagaatttagaaatattgatttgggaaaaaattgcatctctgatcacgctgtggtactacaaaataatttctatggaattgtcattgattggtcccctaaggggacctttgcagttaattgtaccaatgagaataatagatgcaagacaggactaaaacagatactacacaatcaaaaagatgacactatttacactaaaaaacgtgcccagtttcccataacttagaccgattttggtgcagccggcccacaacctaaaatgattaatccaataatgggccctgaacatcccaaattatggaagttaatggcccaatctcatattcaggtttaggaagaaaaatattatcttaaaaaagaaagtgagagacttcaatttgtgtatcaggtttcttccaactgaacggtgcccattcaaagttgtttcaagcctccttttatgttgatggtcggaaatattgatattcgacctaattctcaaactattacttgtcaaaactgttgccttttcacgtgtattgattccacatttgatgtaaaaacatctgtgttgctggtgaaggctagagaaggagtttggataccggtttccctcaacagaccttaggaagcctctccttccattcatatcatcacagaaatgttaaaaggagtgtttaccagaacaaaaaaatttatttttacccttatagcagtcattataggccttattgcagtcacagctactgctgtggctgctagaattgctttacactcctctgttcaaactgcaaaagatgtaaataattgacaaaagaattccgcaaaattgtagaattctcagacccagatagaccaacaattggcaaaccaaacaaattatcttagactgttttttagataggagatcgtataatgagcttagagcatcgattgcaaatgcaatgtaattggaatacctctgatttctgcataactccccattcatataatggtactaaacatcattagaaaaaagttagacatcatctggaaggaaagaataaaaatttaacattaaatatagccaaatttaaggaacaggtttttaaagcatctcaggctcatttaactcccctgcctggaactaacacactctcactggagctgctgatggactttcaaatgtaaacgctcttaaatgatttaagaccactggaggatcaactattgcaaattgtgctaatgtgtatctgtttatactgttggcctttagtctacagatgcgaaagacgcctctaaaaaaaaaaccagacaccacgaacaagccataatagcaatggtggttttaaaaaaggaaaaaggggggcatgttgggaaaagggcttgtggggtacctgtataaactggccataaaaatataggacaataagttgtggaaagccactagaggcctctgaggaggaaagcctcctaattgccatcatgttcccatgctcagagcgagacccgctctcttatctgtaaacactgtgttcaaggagaaatacactcctttgaagcactggaatgtggacagacgtgcaggctcctagttaagcccactcccactagctactctctgataagttaaagatatactgtttgagcacaaagtagattcatttaaaccactattgctataaattacgcctatgatgcactgccaccctttcactgtttcaccctgaacgtctgcttcttagatctaaataattgtactcaataaatagtgtggagaccagagctctgagccttttgcagcctccattttgcaactggccccctggctcccacctttatgaactcttaacctgtcttttctcatttctttggtgccaccggacttcaggtactctacaggtggtgaaaattgacactaattttcagttgtttagaaggtaactccgcagtgattcattgtttgggctcttgtaacccaggcgaggagagccrggggctgccaggagatcaaaaggaaatggtgaacaaaggtctcccttttcaggagaccatgactcacagctgctaggggaatggtactaaaccattagaaaacagcactaggggaatggtactaaaccattagaaactgcccccatgatccaatcacctcccatcaggccccatctccagcattggggattacatctcaatgtgagatttgggtagggacacagataaaaaccatataaatgatattgatggtgatgaagatggtgatggtgatggcaatggtgatgatgatggtaatattgatggtgatgacaatgatggtgatggtgatgatggtaatattgacgatgatgatactgatagtgattatgatgatgatgatggtggtggcttctaagctaaaaggaagaagtttatactaagaaaaaaaagatatcactgagaggctgggccctgttccctccactcacctccaccctaacaaccctccatcgtgaaagttaaaacctgtcaagtagggacagtaatcccatcaaagtgctgggagccctggccaggccacatgctatatcccagtgggagtaagtgccttgagctcctggggcatctgctttctccgtggccagggaaaggagaaaaggagggacccaatatttatggctcccgggcaaggcctcctgcaatggctttccacatttcatttcatttccatttcttctggtctacaaccttgacaggacagtctagttacctctattttatggatgatgaagctggactcagagaagtgatgggactggccaagatcacacagcccctaagtgcagaagccatcacttaagctctggtcttgctgatgctttctactgcattgtgccaatgggtggagaccataaaatcaattacctttccccaaatgtctgaactgtcctccaagaacaagtcctaccaacactccatctttaaacctcaactgagagcatctccgcctggaagcctgcctgcctttttctgcttggctctggccctacagtctttacttttctgctacaggtgtagacctgcagggacttgaaggagccctgtcctagccaggccaggattcaaaatgggtcacaaaaaggatcgtctcagaaacctggcccttcctgggaaacaccccttatgccaccacaggaatggctgtgggccaaacctactagggaatcgacgctaattttcagttgtttagaaggtaactcctcagtgattcactgtttgggctctcgtaacccaggccaggagaggcaggggctgccaggagatcaaaaggaaatcgtgaacaaaggtctctcttttcaggagaccatgactcacagctgctaggtgatcctgggcaggtggactcacctctctgaccccttctccccgcaagtcttctctgaaacagggtgagaagagcccagcatgaagagagtcccaggaggagttattagcaggaaatgaatgggaggggcagggagaaaagggtttcctgggctttactcttattttatttatttatttttttctgagactgagtctcactcttgttacccaggctggagtaaagtggcgtgatctcggctcactgcaacctgctcctcccaggttcaagcgattctcctgcctcagcctcctgagtagctgggattacaggcgcataccaccacacctggctaatttttgtattttcagtagagatggggtttcaccatgtaagccaagctggtctcgaactcctgacctcaagtgatccacctgccttggcctcttaaagtgctgtgataacaggtgtgagccaccgtgcccggccgataaaaggtttttaacgtaagagtatgaacactcagccctcctctccttactccaaggcgaaacctccccgggcctctatcctccggctggttggggtcagggaatttgtgtcgggattccttccagcctgtagggtgagacccagactcagtgggtttagtctcctctcctggaacggaggctggcaccaggccctagaccagctcctgaagcctggagcccgctggttaggccgagggctgcagtacaccggttgtcacgggccctgggcacatcagcctttgtgggctcttcctccatatattaaatgttatgactgtcttggtttgaagacaaatataatccaggtgggatggtactggtttttctcctacttttataagaaagtaacacattctgttggggttaaaagtagtatggctgctaggcaccacctccacttcgtgctggatgagttggcccaggtgaagccctttatgttgcctgggtttaaattctagctcatcacttatgcatgtgcctcagtttccctcctctgtaagatggggatgactgcagcacccacgtgatggggctgtggtcctgcttgaaaggggcttggcacagcgcctrgtgcatagcaagtacttggtgagggctggctgcctggttgcgtgtragttttccatcctcctgtgcgggaggcaagagggacaccttctatcctcataatacaggcaggaaaacygaggttccragcaagggaaaggacctgcccacggccgcctaatacgcagtggaaccaggactccaaggccacagacccagcgactcccaggccctgaacggtgacggaggtgcagggtcagtgatcccagtcacagaccagagcaggagggtcggggaggggaagcgccaggccaggccagggcctcctgcctccggttctgcctgggtggaaactctgaaacaggacggacttggccctgggcacctccaggctgtgagaactgaggtttttcagtctctctgagtctcagtcaagtggagatgaggaaaagataccaagaatgacaagcacctggcacagcccgcgcctcacagcgtggtcaatggatgattttttggaaagggtgggtgatgggaagggtgtgagtagaaagagccacgagattgcccgccatcccccacactgcctggaagcagagcccacaggccccagctggcccctccccggggacttggccaaagtgtcagacctggaagaatcgttgcatcactgggcactcacgggttaatgacagggagtggacaggacctgggtatttaactaattaggaggctccctgagatcagaggtggccctgctgctttcttctgctgccttttatgctccttgtgcacctcccttccccscaacctgggatgaaatctccccacgtgctggtgttcctttgcctcctgggtaagtgatctttgtgaccttcrgccttctgccccatctggcaaccccaagctccctggatgcccctgagcctggccctaccgagggtgtggtggatgccaaacactggaggctgcccccttcctgccaccagggtgamcctgaggccagttttgcctgagccagcggtggctggagcagaggggaggagaatgcaggctgggaggggtgaggggcatgggccaggggctggcgcktcccggatggcacaccctaggctccttctcctatcctagcttccatgtttggctccaacctgccaaggtgggcaggattcagtcccatggctgagtcaggagcaccgggaagaatttggggaggtcagctgaggtggtcaggagacaggtccagtgccatctgatgagacytggggggacagagtgttcctgggtgagataagggctgacacctggggaggactggtggctggtggggagcccctggaaggggtgaatgagtgacaytgtagtagatagaagagtgggaggggacactgggggcgctgacacactggaggagaggactaggggatgaaggtgcaacggatgtcactggcaatattattacttattaccacggttgttgttgagagtgggttgctttggggaggtgagcttaactggacaactggagagatgcctgtgntcagatttgaggggacatcaggggaagttggctgcagagggtggggccctccctctccctctccctctccctctcygcagtggctctggtcaccgggaacctggttcagtttggggtgatgatcgagaagatgacaggcaagtccgccctgcagtacaacgactatggctgttactgcggcatcggtggctcccactggcckgtggaccagactgactggtgaggaagcagcctgcagggggacctccatggggatggaggagctgggggatcctgggaggatcctgggagaaggagggaagcctgggggcacctggaaaattcaggctgatctctcctctgggctgctttgggctcgggggccccgagcagcccctggtccagcccagcctggctcacaggtccctccaggtcaaccatgacccttacaggtgctgccacgcccacgactgctgctacgggcrtctggagaagctgggctgtgagcccaaactggaaaagtatcttttctctgtcagcgaacgtggcattttctgcggtaggtggagagccctgaagtgacctagacaccctgcggtgaggtgggtggaggcagcttaagacaggaagcccctcctgayggtgaccttgggccttatcagagccagaccctgggctggaggcatggggtttcccgtyaccaygtaacagtggagacccagatgttcaccaggcacccaggccagagaagcccgtaccccatcagtgcagccctcagccccaggtatctccctacccacagacacctcccagctccagcctctggaaagaggagcagaggggtctgagctgagccagggcccagaggagctggactcaggcaccctcccaaggcctcaacaggagctaaaggtgaagtccttcggacagaacgagctggggctttgactggggacagcagatgctgtttccaaaggctgactcctcamtgggactgtcaggctggacccatttgctcagctgtgccatgtccagtgcccatttggaccaattagctttccttcagtcccaggcccaggcaagcagcctcaaccaagtgagactgtcgagggaccccacatgagagagccaagctctctccctgccacaaagccaggagcagcctgaaagaagggcagggcctggtgggcggatgctgcagcgcggaaggattcgggaggtcgcggcagactcaggtctctaaattctgtcctggcggcggggcagagctggctccatttcctctgccgccaaccactcggcagggcaatgtgccaggtactgagtctctgtcgctgggagtccatgcaaggcagaagcagccacctgccaggatcagggctgaggggaggaggcaggtgggtggagacacaagctctggattctacccagggcgtcaccttccacctgcctgtgactttggacaagtgawgtaatccctggaaagcctctgtttcctcacctagaaaacggagaggcttatacccacttccccagctcagcccagctcctggaaaaagccccccaaaagaggctgaccggctcggcgttaagagtcccttccaaccctgggtgttgctgacatagcgggcgtgggcagagccctgacgggagacgaaggctcaacttcaagaggkgaaatgaggcacctggcctgagctgtgagatacagtcatggggacaaaagggagcsagggccactgcaggcagaggtgacagaggcagctgcagtggagacaggaggagccttctgggcccctacagagctgatgccagctggctctaggaaggacaggtcagggtagaagtctgactcccaggctgggtatgggcagaaaactgggctctgtccactctgatgaggacaggcagagggccctgagcagcctccagctttggtcccagtggcttccagcctaggcccacgccactctggggcacacatagccatcagattgagttgctgtcatttcgtagctgtcctctctgcttgatggccacaatccgccatcagcaacgcatcacacaggggtgcaggggttgcctagaaatccccctggtcgggggcagtgagagttagggaaccacgtggtgtccctaaggccggagagagctaagggcagtcagcgtgggcttgggagagcagggagggacagcgagggcaagcttccagcttccctggtgtcctgagccacagtgcgccccgcccttgtctcttgtctcacccatccgtgaaacaacccgggagcttgggcttccatcagaatggagttggtccaggtcaagaacgtggacccagaagcagccaagagctgtcccacacrtatcctgagcttctgtggtccctgactcactttgtcccatccagccggcaggaccacctgccagcggctgacctgcgagtgtgacaagagggctgccctctgctttcgccrcaacctgggcacctacaaccgcaaatatgcccattatcccaacaagctgtgcaccgggcccaccccgccctgctgaggctatgctcggcctcccccccgtccctggaggtcccgcctcgggctgctgtagtcccaggcctggggaacattggcaccaaaggccctccctttggaaaattcctttcctgcaaactcatccctccttgagagctcagagatatgtcctggaccatcactagcctcccaggctaccccttctctgtagaaagaaccctgccccaggagccatggacccttcagcacccagaagactgtcactagcttctgggatctcagctccctcttctgaataagtgaataatgttttcccataattctaatgttctttgagtctcaaattctgtcaatcattctaggatttaattcactagagtttcattcatacattaattttctgatcacctaccttgtgctgacagcatgcactggaatcagtgggaacaagtctgacatgggtggccctgcctgcaattccagcattaaattcttttaattttccatgacagtaagtttctgtggctctctttttctttttctttttctatttttttttttttttttttttttgagacagagtctcgctctgtcgcccaggctggagtgcagtgtcgcgatctcggctcactgtaagctccgcctcccgggttcacgccattctcctgcctcggcctcccgagtagctgggactacaggcgcccgacaccacacccggctaatttttttatatttttagtagagacggggtttaaccgtgttagccaggatggtctcgatctcctgacctcgtggtctgcccgcctcggcctcccaaggtgctgggattacaggcgtgagccaccgtgcccggccctgtgactctctttttctaacattctacaatcttatcaaagataatgcaatctctggaaggaatatttctggccatatggcttaatgtgaaaagcacgaaaaataccaacctaaaaatattgtccccactgtgtcatcaggcctcaaatccccaacactggcaaagattggttaagagtgagaagcagctctagatggtcttatccacaccccttctttgatgggcccctgggggccagagaggggatgttctacccgagggggtgtccccactccctggcccttcatttcttcatgaagttgtcatcagccacccacgctctggtatggccacgttaaccaggcctgctggttgtaatcttggaaagaccagagtgcccagggccgttcagctgtgaggacacaggaagaggaggaggaaagggttcagcatccagggctgactccaacctcccgattctgaagccatgaagaatgtaatgcactcaaggattcccaccaggaggaatgcagcctattctggaagcaatctatttcagcagatgttacttctaaagatagaattatctattatatgctgatgaaatcttacaggactgggattcgcctgctcaatgacagagcacctgccaatgcattgcacagggcaaagctcacagttggacactcaacaaatgaccactcccttcacccttctcagggcctgtgcacagcattcaggaccttgagggcagggaggagagcaaaaaaaaatcaaaggaagagccagtcatggtggctcacacctgtaatcccagcactttgggaggccaaggcgggcagatcacctgaggtcgggagttcgagaccagcctgaccaacatggagacacccagtctttactaaaaatacaaaattagccgggcatggtggtgcaggcctgtaatctcacctactcaggaggctgaagcaggagaatcgttgaacctaggagatggaggttgcggtgagccaagatcatgccattgcactccaccctgggcaacaagagtagaaactccatctcaaaaaaaaaaaaaaaaaaatcaaagggatgtatcgctgtgacctttaaaaggtgaagaagctctgtgctagcaaaaggaaggaggagaagaaagggaggacaggcgtgtgtactttgctgttgtaactgactcaaatcctcagccaagtatcaccagaagaccatgtcttaaagcaaaaacggcctgtgtgggggaagaatgcaaacctcctttgcaggaaaagtggtcctgaggcgccctctggtgtccatttcattcaggccactagggagaaacctgcgcttggcttaaacctcgatttctcttcctcaggtgggcaaagtgtgcttctgggctagtgaaattggtcccctcacattttcataaataaatatactgagaaaatgccaaagaaggccatacaaccatctgaggatgatggccactgcagaaacagaaaacacagggagaaggagctgatggggcagattagagagaggtgacacctgggcatgatggatttaaggtaccaatgggacacctacctgatgatcttaacagttgtataactgtccgacgaaacaaacattgaaacttaggagcaagattccagcgcagcctgctgtgacccctgctactcacccacccccacccaccaaaaccaagctgtcttttggccacagaccagcctttactctttgctttcccagggctcgataaatgttttgggttttttgttttgttttgtttttttgagacggagtctcgctctgtcgcccaggatggagtgcagtggcacgatctcggctcactgcaagctccgcctcccgggttcacgccattctcctgcctcagcctccccagtagctgggactacaggcgcccgccaacatgcctggctaattttttgtatttttagtagagacggggtttcaccgtgttagtcaggatggtctcgatctcctgacctcgtgatccgcctacctcggcctcccaaagtgctgggattacaggcgtgagccaccgcgcctggccaataaatgtttgatgacgggatcaaggggcctgcttaaatcctgtttgcctatgtgtgcgtatctagagaacccttgatacccagcagcagacttgcaaaagagactgaaaaaaaggaagggagaagcctgaacttgaactgggaggttccaggtagagcgctttgttctgccgctttagcagcagtggctctgcttagacctttgctattcaacgtggtccatgggcaggggcagccgcagaagcagcagcagggatcctgttcaaaatgcagaatcttggacctgaccccagacctgctgaatcagaatctgtaagttaacaagcccccctgatgattcgtgtgcacattaaaatctaagtgctgataaatggagtctcagtctctgcatttgtcaaatggaagtatgacatttccccagcaggctggttatggcaaagtttgagataacatgcatgaaaatgtacaaataatggctagcactgaaaaatcactcgtgttctaggaatgaatgaatggatagtcattaacaatagctaacacttgctgtgcactaggcatttgccaggcactgttgtaagtgctttatgtgtgctaattcattggatgagtaaagtaggcaacgggactgtgtcaaagctggggaggggacattcttacctaaatgtttcatagtttgcctctccaattttgatgagaggatttggattggttttgcttttgttcctatttagcacctaacaaaagctatgcatgaagtgcaaaggtaaagaccttcctcaattagtgaccagaaatcacagtggaattcccaagttcaatgaggagtctgattaggatttcctggacatgcatctgcttcactggggttctttgcaatgtcaccaccagagaactgaatactaaagttaattctttccttcaataagttttatgcaaattatgcttctggtcttttcctggatgctggagatagacacgaatcagacagagtcaaccagcagacagaaaacagcaataattctacactagcaagtaatgtgacacccctaacaagagagtatcaggactaatggttcttaaaccctccatccttcatcacatctccatcctgtccactgatgccagcttcattttcccagagcctgattttcatcatgtcactcctctgctcctgaaccatcagtgactccccattgtccaccagcccctggtattccaggcttggtgtcatctgcttttccagcctcttatgcagcaatatctatttactaagctcctctgctgtcctgccttcatatccttgtgcagtagcttctctcaacctaaaagcctcccttgcccacaggcacatcaccacgctaaaatccatgggcttaaagtgaatcccaaatgtcgtctcttcctttatattcagagacagggtctccctcttgcccaggttggactgcagtggcacgatcatagttcactgcagccttaacctcctcgactcaagcaagcctcccaccttagcctcccacgtagctgggacaacaggtgtgtgccatcaattctggctaacttacttatttttggtagagaccgggtctcgctatgttgccaggctggtctcaaactcctggcctcaagcaatcctcctgcctcagcctcccaaactgttgggattacagggataagccaccctgcccagtcccaaatgtcaccttttctatgatgctgtttcaattggagcggatttcaccctccttgaactgccaagctgtgtttatacctttcctagaactgcttatcccgttatttgggtccttgcatggtggcggcagactgctctgggttcaaatcctgtctctgctactaagctgtgatcttgggacaattatttattcctgaatagaaccatcagcctcacagggtggttttcaagttcaaatgagaccatgtatccaaagtgtccggggcatgctagctgctccatctacgcttggccaccttctgtatttttgctctccaattgcaaatgtcacacagtagatgctaaacaggtacctgttcaattgaattctgcgctaatgtcccccaaaggcagagatagatggtgcagcatttttccaggcaggcgctacctgtaacattgccaggttagaatgcacacacaggccaactccagacactaaaaagccgtcaggcagatctttgttgttttggggttttgagacagggtctcaccctgtcacccaggctggagtgttgtggtgtgataaagctcactgcagcctaatactcctgagctcaagtgatcctcctgcctcagcctcctgagtaggagggactacagacaggcacccagccccaaaccccagtaattttgtgtgtgcatgcatagagacgggatctcgctagattgaccaaactggtcttgaactcctgagtgtgagcaagcctcctgccccagcctcccaaagtgcagggattacagatgtcagccactgcacccaggcctgatcttgagaatccattcagcaagcacagcactactcttccagtagtgaaaggcacatgagaggtgtttcaagaagttcccagtctttctccaaactgattatacatccataataagctctgtcctaaacactggagcatacccatcccactcctaggttttgcttgcgctggccattcagtccaacatgtcttcgctccctatttctgtatcctgtctcccctttcgtgcctcgtccaaatctcacttcctccaccaagccttcccgaattctctgaactcacagccctctcatcagtacctcctttatggcatgtgctctctcctgggtcagtgacgtgtccactttcattcccggactggaggctttttgaaggcaggatccatgactgtttcaatgcccagaaataaggacccatacagagtagaggttcactagatgtcagatggattcttggatgtttagatgaataaattgaacagaaacaatcctctggggatacccaagtccttctaccatagggaggttcagacaagtttctccaagaagataggaaatgtttccttctgccaagccagaatctgtgaagtgacaggactgg

SEQ ID NO: 95748 - DNA, 20974 bp, Homo sapiens
tggctaatattttgtatttttagtagagatggggttttgccatgttggccaggctagtctcaaactcctgaccactagtgatcagcctgcctcagcctcccaaagagccgggattacaggtgtgagccactgcacggagcctaaaagtttattttttgtttgtttgtttgtttgttttgttttgttttgtcttgtttttgagatagaatctcactctgcttcccaggctggagtgcagtggcaccatcacagctcacagcagcctcgacctcctgggttcaagcaatcctcccacctcagcctcctgaatagctgggactacaggcatgtgcaaacatgcccatgcccagctcattctttttttttttttggcagagatgaggtctcactatgttgcccaggctggtaaaaggtttatagtttacgtttaggtctctgatccattttgagttaacttttgtatgtggtgtaaggaaggggttcaacttcattcttttgcatataggtatccagttatctcaacaatgtttgttgaaaagaccattttttccctgttgaattgtcttagcacccttgaactgtggtgagttttggttaatttttgtatatggttagaggtatgaattgaaattcttatttcttttctgtctttctctcccttccttcctcccctgatccctgttctgtttccctctttccttctcatcctctctctttcttctttctctccctccctctgtttctttctctctttctctctccctccttctctctcttctttctctccctttctttctctctatttctctccctattttctctctatttctctctctttctgttgatagtcagttggcctagcaacatggttgaaaattctgttatttctccatgaacttccctttggatccttgtcaaaaataaattttccacatttgtaagtctgattctcaatcatctattctgttccattgacctatttgtttatctttatatcaataccatactatcttgattacagtaacttttttttaaggcagagtctcactctgtcacccaggttggaatgcagggcacaatcatagctcactgaagcctcgacctcccagactcaagcaattctcctgcctcagcctgctgggtagctgggactacaagtgtgtgccaccaagccatgctaatttttgtttgtttgtttgtttgtgaagacggggtcttgctatgttgtccaggctggtcttgaactcctgggctcaagcaattctcccaccttggcctcccaaagtgctgggattacaggtatgagttgccatgcctggcccactttataagtcttaaaatcaggtagtgtaagtcctgcaatactattcatcttttcatagttgatttggctattctagatcccttgaatttccatatgaattttgggatcaccttgtcaatttctacaagaaaagtctgttaggattttgattgagagtgcactgactaatgagcaaatgagaattgacattgtaacaatattgggccttctgattcataagcatgacacatcccttgatttactttggttttccttgatttctccgagcctcattttaaagtttttaatgtacaatatctgttttttggtcaattttatccctaaatatttcacatttttggatattattgtaaatttttttttaaaatttcagtgtccaattattcattgctagtatgtagaagtacaattattatgactatttcgtatttttatcttatattctgcaaccttgctaaattcagttgttagttccagcagcttttttgtagcttctacaggattttttatatggactattatgttgatgccaatagacatcaactttcttcttcctttccaatctgaagacctttcatttcttttcttggctgttgcactaactgaaatcaccagtacaacgtagaatagaagtgatgagagtggacattcttcctaatcttcaggagaaaagcattcagtcttgcaccattaagcctggtgttggcaataggtttcttgtagatgccctttatctttttttttttttttttttgatggagtctggctctgttgcccaggctggagtgcagtggcgccatctcggctcactgcaacctccgcctcccgggttcaagcgattcccctgcctcagcctcctgagtagctgggattacaggcatgtgccaccacacccagctgatttttgtatttttagtggagaccaggtttcaccatgttggacaggctggtctcgaacttctgacctcaggtgatccaccagccctggcctctgaaagtgctggaattacaggcatgagccactgcacccagctgtagatatcctttctcaagctggggaagttccattctgtctcagtttgcagacagttttttaaatcaggaatggatgttggattttgtcaaatggcatttgttttgttttcttggatttgttgagatgaccatatggctttccttctttagtctgttagtatggtatatttacattgactgatttttaatgcaaaaccaatctttcattcctgggataaaccccactaggtcatggtatattttcctgtttaccagcatttgcccgtttgccaatattttgttaagaatttttttatctatgttgatgaggaatcgtagtcttgtagttttcatttcttgtaatgtctttatctggttttggcattagaataatgttggcttagtagaatgaattgggaagaactttctttatctaaattttctggaagaatttgtgtgtaattggtgttatggactcaattgttttcccctcccctaaatgtgtaatttgaagctctaacccatggtacctcagaatatggctgtatttggagatagtgcctttaaagaggtgattaagtggaatcaagggtgggtcctaatccagcatgacttgtgtccttataagatgagtaaatttagacacacaaagagacatgagagatgggcatgcgcagaggaaaggccacgtgaggccacagagcgaaggtggcatcctcaagccacagagaagggcctcagaatgaaatcagccctgccagcatcttgatcttggacttccagactccagaactgggagaaaataaatttctgttattaaagtccctccatttgtggtattttgtcatggcagccctagcaaactaatacaattggtgtttcttcttccttaagtatttggtcaagttcaccagtgaagccatctggacctggagtttgtttatgggaagattttaaactatatattcagcagctttcataaatatccagctatttccagttgagtgactttgtgcctttcgaggaaattggccattttattgtaattgttgaatgtatttttatactcatcttaataccaaaaattacaaataaaaaaataaaaaccaccatttattccacgtctaaagatgtccattactaatgcttttacattgtatccttctagataatttttatacctgtgtacaccaactcctttttaaaaatgctattaccttgtagtacagggtggtttttttgtgtcaacaaatattatttgaaaacatgattatggatggatggctaataatttgcttaactaacccctaatttaagttgcttctaatggggttgggggagcatcaagaaaacaccccttcagtgtctctaggagcaactcaagttggcatttggtctgcagtcccagaagtggaattactgggtcaaccagtttattattgactcattattgagcaccctgagcttggtagggggagggtggagggagagggaagagcccgtcctcttcctcaaggatcaagcctctctgaagaccagcccaaccagcatgtccagtgggaattccagttgagaaagtagcagtgatgctgctcagaggctctcaggggtccccggccccagccttggcctcctcgacctacgttggagtggctctagttatctgcaggttggaggctgtatcttcaggatttggacatactgggccttacttctcgattcttccttctttggagtgtggtgacatcattaagtggtgtttgagaaaatggaggcaaagatagaagccaaactttgtgcagacaagtgaagacagagactagtcttgttttccaatcactcccagtctgatgaagcagatgcagccttgtcccaagggggaagccctaggcttttggaagaaacaaaggccccttccttccaggatccccagtttgaaggaagtgtcaagattcataaaccaaaacatatacaggtaacatcacctgtatatgttttggaatgcatcaccaaatgcaaacaaacaccctcccatgcaaggacctgtgactggatgcagtggggtttttccgggataacttcctggagaggagatggacttggatccacagagaggcagctgggcagaggaagggtgggggctgggtgagggggatgacatgtggactgtggtttggtatagccagaagaggaggctggcaaagctaggggcaggaagggaagccccaggggtctcttctgccccttgttggcaggtttgaggacattgagagagatggatcaacttgaaggtgaggggattatttgcagtgtcaacttccaagagtcaccttctcctgcctcccttaccatcccctcccagtatctcaattctccccaaggctggagatcagcccctactttgctattgtttgtagacatggggtctcactatgtttcccaggccggtctcaaattcctggcctcatgcaatccttccgtcttggcctcccacagtgctgggattgcaggtgtgagtgatcacgctgtgcccagccctctactttgtaacaatcagatctttaactgggcacttacacctgccccaacccaccacatgacacccgacttgtatgagcatcaccctcattcagtgaggccttgttatgtgcacttacagctgagaactcagagaccagggaagggagctctcctaccaaggcctcacggctgggaagtggtggtactggcatgggatcttctatcagtgcgactgctcaaacccccaagctcagcccaggtgacccagccctgagaggggctcccagagctcacactgccttggattctctccagtcccatctttctcatacataccaccccccttcaaaaaaggcaaatggtgctgacaaccaggccccccaggatctccgtcagataattgtgcccccttcaagggcaaatttggcaatgtcacaacgctgctaagttggtttaggtagaatcctcaattttgtcctccatatctgattgggtttcttgtcctccgtggcccccaggtgatgtctgagcaacccacctgccttcagcaggaatcctggtggatcggtttagccagagtctcccaaccccccatgacccctgatgtttcttctggttaactttccaacctcagaccccaccctgctccttggctatgaattccygctttttcttattgtatctgctgttgagtccagtctctcttccccactgcggaagccactgccatggccctacacctgtccccatggcccctttgaacaaagcctgccttactgtgtttcaacaagtgtcactgagtgatgttttatctttaacatctttcagatggggaaagagaggcctttgggctaatttcctttcagatgcatggggaaagactgactctcctatcaggtatgtaaacccccaagtcaggcagaccagagcacccagcggtggggactgtaccagctggctgtgggcagggctgtgggggagggaggaggaggtggagcctcctttttctagggcatgtgtcacctgccactcccctgccagtgtgcgaggcagcgtgaagctggggcctgctccccgcagcctctggagcgcatctcagaccttctgagacctatgttgctggccccccagaacccgcaacatggcagatggggcaaaggccaaccccaaagggttcaaaaagaaggtgctggatagatgcttctctgggtggaggggcccacgcttcggggcctcctgtccttcaagaacctccaggtaggtgcctgttgccctgagatggaatcctccagggaggggcagggacaggcgtgagggactggctcctagaatccctttctcctaagagtccacgtggtgggcagaaccccaaagggatcatttagtcaaccttcacgtggcactcatgtggcccagggagagtgaggccacacaaccctcatgtggcccagggaggctgaggccacacattttggaagcggtgctgggactggaatccagggacctaggactcctggctttgggttcaagacccagctgctaggctgggtcatatgacttccttcccggactccctagtgtgtgcatgggaggtctggcctgagacagcaggcttcctgtcctgaaggctgatgcgtggagggggttcctgccagagtggggggcaaggaggtgttcgtgcctcctggctctgccatctggggtgcgctcctccaggaggggctgggcaggtactgatgacagcgctaggagcagcaactaggacatcaagggacagcattgatgacacctgtcctgaggctcaggaagggagcagcaggtccaacactgccaagggtggaggggatggactcaagctccgggtttcgtcctccctcaggtctagcctgggtatgaagaagttcttcaccgtggccatccttgctggcagcggtgagtaaagactccagagggctcctccttctctcccactcccagcttgtctcccgtgaccttgggcgcctgagttatggttccactgaccagcctaggttccttcctgtctctgggcytctgcttcttgtctcagcccagcaggctgcacccaattctggggctgtttacccctccagccacctgtaaacatgcatttatgagccctggggsgcagggcgcagggctgagcaagcatcrtaaaatgctggtgttggctgggcatttgtgtacctgaatgtgtactagtgtgtgtccatcagactggagttaatgattttgtgtgcagacaggcacaggcatctatgtgtgtgtaggtgtgtctgagcatgtgatgatgtctatgtgtgcaacatgcatccataaagtatgtgacagtgtaggcacctgagtgcgagcccatttgtgtctctttgtgtgagtgtgtgttaattggggtgtgtgtcttcagagcatgcttatggatgaagggtgcatagatctgcaggagggtgtgtgtgtgtaggatgggtgtctgtgtactgcatagtggtgggaggtcaggggcttctttctggggttggtacccagggcatcatggctctgggcagccgccccataggattgttgcgtgaggctcttgacacagacctgaccctgccactcgtcccggcatcatttatgtggcaggtgtcccagctccatggaccattggctgggcctctcactggccttgcatgcagcctgttaaacctcgccagaacacagcctggcttgaggaaaagaaataaatgacaaaaaccaaaataaggttccacgtggccagacgtgagagagggctggttgcrttcaggcaaagtgacttgttattgagaagacgactgcttgagttcagtccaagccactggttaggggcagagccttcaacccaactgaatgcggacttggattccttcgcttggacggtcagtgtggatgtggccttgggccaggcccctgattctcccctggatgcgttgtgtatgtgagtgcatctgtaatgcacgagggcgagtgtgcaagtgtgtgtatcaggtatgtgtgggtgtatatcatgtatgtatgggtgagtgtaggtgtatgagtgtatcaggtatgtatgtgtgagtgttgagtgtatcaggtatgtgggggtgagtgtgagtttgaggtgtctgggaatgagtgtgtatgcaagtgcatgtggtgtgtaaaggagagtgtgaggtgggcaggtgtgtgagtrtgtgtgagatgggtgtgtgtgtgtcagtgtgtgttcaccctgtgcatggccacgtagacttcttgctcttcttctcttgccacatgggagttgactgtcgggggtcctgggactggaggtgccccctcccgggtaacacttacaaggccagggssagatggggaggcagccagggcctcgcagtggttgggtccctcctcaaggcgctgtgtgggccaggcactctacacaccttcatgatcacacttcaacctccaaggtgccctgcaaggaggcgtcatgatctccatcctctgctttgggcattgtgatccgagaggttgctggtgtgtgccaggcctccagcagggcactggcctgcctgatctctcatggtttagattgttactcccattttacagatgggagaacagagccccagggagtcccagctgggcttggttattggcctaggtctgtctgactccagattcaatgctcttcccactaaggcacattgaggtggtgagttccctgtcattagagatgtcggacaccatgtctctggaagcaggcaagagtggcctttgggattcccctgagccaccagtttctgaaaccgttggctttcccctctcccagtacatttcctcattcaggctggggagcagggtggacatggagagagtggcaggaagggtgctgagctaggcccctcacgctgactgcagctagaatggctggggtgggggaagcaggcggagctgcactgccctgcgctgcggttagcttcccagctccgcagtacacaaacctggggcagtctgggctctgccccctccagcctgtgggacctgggcaagcctgcacctttctgagccttagtttcctcacccataaaatcgtgatagattggctctcctgctggtgtgtgtagggcagcttcccccaggtaaggactgtaggtgccaggctgggcgtgtggacccagtgctgcatccaggaggatgtgcagaggcagcgcaggcaattcagagagccaccgcacaggcacagactgcaagatggagacaagcagtggccagggggagaatgtgtcctggggtgggccggcctggcaggtgccatgaagctgatttcgctggtgcaggaagtgtccttgcactatttctccctctgtgtgtgtgtggggagactgttttccttcttcccacctccagccagtatcagcctgtaatacgaagccttttctgtttcttcattagcgatcagagcaccgaattgtcgctggattgatcctgagatgcaccaggcccgggatcagggtggggactctgaggcccccaggagggcagaggcaggaggcagagaccaggaagggacccagaatcaaccccctgagcttcctaagagcatgtggcctttgcgaagctccctccagcataccaggcacttgggcatcccccttgagaagtgtgtacagccaagtggcagggggtgtggatgcaaaaccctcactgcctgggtccaaattctgtctccactgctttctgacaacgggatgtagagcaagttactaaatgcactgggcctcagtcttctcatctgcacagaggcataacaagagcatgcagggggttgcagtgagcactcaatggattcatgcacatggaaggggcttgggacagtacctggcatggagcaagtccctagcaaggatgacctgcgttgttttctcagggccgcagggatgtgggtgcacaccatacatggtaccttgcagatttctttcctctggcttagctgcccacgcttcttgccccagcttcctctcctgctttctycttccttctcccacctaccctaggtattgggaggatgrtcagtccagactctcaggatgagagaggctgggagcggccagccccggggcaggggctcagagcaccccctggttctcttgcagttctgtccacagctcacggcagcctgctcaacctgaaggccatggtggaggccgtcacagggaggagcgccatcctgtccttcgtgggctacggttgctactgtgggctggggggccgtggccagcccaaggatgaggtggactggtaggtaccagaggcctgggctcctgtcaggggccaaatgaggacagctgaaggtcagactgacyttgccctccatccctgagtgggggagaccttctttccccaaaggatccagcttctttgatgacttggtgaccagagcctggtctttgactatgttctttccaaactgttttgagcgctttctgttgtccatctccaaggccatgggcttggaagtgtttcagcccctcctctctctaggaagggacctttgacttgctccaaaacacacatgggagagcagtcacacagctgacaccccacaaaggcaagggctgtgacccctgcctgcctcacactggaggctctggaagacaggaccatgcctcctccatcagactgtgagctcccagcagccatggcttgtcttctgctcctatctccccaacagcaggcagcaccaagtttgtatcacagaaagctaaataaatacacattgactagctgacttcacgcccccagaggtgatggggacagccacactgcctgtgtttcttgttcgccatcctaccagtccctgttgaccctccagacctttgtccctccctggccatgaggcacagccaggggtggcctctgcctacagtcgacgctcctccaaccttgacgtaaacctaggcaggtccctgactcctcccactgctgcagccggggctctgggggaaagctgggagccctgtggatagaacaaagacacaggggagaatgtgtcctgggaggggcaggtctggcaggtgccaacgaagctgaagctgtgagaatcagaacctggggtgccggccccagctctgcttggctgtgtgacctcagacaagtaactgtccctctctgggcttcagttcgaacgtttgacctgcgagagactggaagagatgatcagaggtctctgctggtgggagatgggccggcccagccatgcctgtccactcacctctgccgctccctaggtgctgccacgcccacgactgctgctaccaggaactctttgaccaaggctgtcacccctatgtggaccactatgatcacaccatcgagaacaacactgagatagtctgcagtgagtccctcccctgtcacctgggcccccagagaagggagtggctggctctaccagcctgtgctgggatggtggacaggcttgccagattaaatacaggctgccagccgggtgcggtggctcatgcctgtaatcccagcactttgggaggccgaggcgggcggatcacttgaggtcaggagttcgagaccatcctggctaatgtggtgaaaacccgtcgctagtaaaaatacaaamattagctgggcttggtggcatgtgccagtaatcccagctgctggagaggctgagatacgagaaccactttgaacttgggaggcagaagttgcagtgagccaagatcgcacgccactgcattccagcctgggagacagagtgagactctgtctcgaagaagaaatgaaaaagaaaaaaagaaatacaggctgcctagtgaaattcatttcttagctatacaatgaaaaatgttttaatattaaatatgtcctaaatattgcatgggacatattgatactcaaaactaaatgctagtataaaattaattaatatttatagataaggaaatgtttaggacatacttctactaaaacatgtattttttttttttttttgagacgcagtctctctctgtcgcaaggctggagtgcagtggcatgatctcggctcactacaacctctgcctcccaggttcaagtgattctcctgcttcagcctcccaagtagctgggactacaggtgcatgccaccatgcccagctactttttaaatttttaggagatacagggtttcaccatgttggctaggatggtcttgatctcttgacctcttgatccacccacctcggcctcccaaagtgctgggattacaggtgtgagccactgcatccagccaaacatgtactgtttacctgaaattttaattaattaattaattaattaattaagacagggccttgctctgttgcccaggctggagttcagcggtgccatcgtagctcactgcagccttaacctgggctaaagtgatcctcctgcctcagcctcccaattagctgggattacaggccagtgccaacatgcccagttgattcttgtattttttgtggagatgggggtctcactatgttgcccaggctggtcttgaactcctggcctccagcaatcctacttctgcttcccaaagtgctgggattatgggtatgagccaccagcccagcctgaaattgaaattcaaccaggaatcctgtgttttgattttggttttgcttttttgctaaatctgaatctgaccagcctagctgtggcttgagaacatctccctgaggtgctctgatgctccagtcctggaattggcatcccaattctcctgtcccccaaattctgggtgattctgattccgtgggtgttggtggggcccaggaacttggctttcagccggctccccagatggttctgagactgcagctctgcagggaggctctgagacatgctggcctgggagtcaggggacctgggtttgaactctggttctgtcaccatctccctgctccatgtagccctgggcagctccttccccatctggcctgtttcctcactcatgggtccactgaggggtttggatcagagcggactctttctcttctggttctgtcactcggaccccacctgcagaggtggctccatcctaggacgcccagtgtttccagggatccaaggtattagcacctggcctggcgggttccttcatttaccatgaacttgctgtggctatttcccaactgagacatgtaggtaagcgcaagtggcatccaagtagcagcgcccaggtgtccctgccctgccctactctgtgctcctctctgggagaggactccccctggcccagcctgtgggcaaccactgggccctctttgcccccatgtcttcacctggtggtaccagttgttgcttattaatagctcacaagcaacgctggctttgcaaagacactcaaatctyctgtcattgggaaggagtctagtggagactggggtgcacttgggaccccttgggggcccagatctctgtggtcctcatgttctgctgttcaaacatgaggtggaggggctggcctgagatagcagatgcccccctattaaagcagctggaggagagagattctcccccagccaccacccaccaggggtaacagacgaacttaaagcagtgattttcatgctgggttctgggaatccctggggccatcagagccagaggccctgagaggtgctggtcacagtccctgagaggttcagctggtactttagtgtattttatcattaagcagcttcttctggggccgtctgatgcatcagctttctttaaagagtttcgtttaagaaacaggattttgctggtagaaggtatgraaagtttgcagaccgatcaagctagttggaggttctcaaagggtagcccctgaaccagcaacagcagcagctgcagcacccaggaacttgttagaaatgccaatcatcaagccccacccagacctactgaatctgatacttaggggtgaggtccagcagtctttgttggaacaagccctccagctgattctattgtgcacctaaggatgatttccgaaatctactaattataacaacagcatagggacaaacaacagtagcatttgccctggattaggcatgtgagaggctcttaggcactaagcttttgaacaattgtttttcccactcatttcttaccaataactccctcttcttttttttttttttaagatgaagtttcgctcttgttgcccaggctggagtgcagtggcataatctcggctcactgcaacctcctcctccagggttcaagcaattctcctgcctcagtctcccgagtagctgggattacaggcgtccaccaccacgcctggctaattttttgtatttttagtagagatggggtttcatcatgttggccaggctggtctcmaactcctgacctcaggtgatccacctgtcttggcctcccaaagtgctgggattacaggcgtaagccactgcgcccggcaataactccctcttcactgggcgttctttgattctgtgattgaagggaagaggtctgggatggcaggaagtaacaagcctgggaggcgtggggggtgctttagttctgtgggtgacttaggtaaacccatccccctttctggggctcagtttccccagctatgcaataactgtgttgggcttcagtggttccccaattttactatgcaccagagtcccctagagagcttgttacaacacagactgccgggccccagcccagagctgctgaccttgtaagcgtggggtggggcccgtgggtggtgctggtcctgccgcccaggtaacacattccaaggaccactgggctctccaagtctgtgtgctccccttccccagcagtagtcctgggggagctgctgcccctttcatccacagcctttgccaccccatccccctgtaggtgacctcaacaagacagagtgtgacaagcagacatgcatgtgtgacaagaacatggttctgtgcctcatgaaccagacgtaccgagaggagtaccgtggcttcctcaatgtctactgccagggccccacgcccaactgcagcatctatgaaccgccccctgaggaggtcacctgcagtcaccaatccccagcrccccccgcccctccctagagcctctgaggtttgagagagagagcgggaggagggtctggcttggggaccagacgaggtgcagggagggtaggagccaggccaggagcctgagggttgctggttgcctcctccctggagctctccagtgagggctcagctctcagaggactcaggaaggcctgggtcctgactcccccagcccagccccaggcatgggtgcctcctgctgctggttctggactgggtgggaggcacggagcttataggggtctctcctgagggtggccggggagacctgagagagaggaggaggggcctctgagtggggcctctgttgctggcgccagtttaactccccggagccttagaaagtctgagccttagaaagtctgggcctgagcatccaggcccagagctggatgcatcctcggcccaagatcacaggaaggcagattgctggtcacaaagcatgggttccgggagcccctcagctgatcccacaggatggcctggggtggtggctactttgggcttgaagctctctagagccccattcacagagcaggtgccccaccccagccctcactgaggtggccatgagtccaggttcagaccctaggggatgtgcagtgctgagtgtcccagccctgaagtctagcctcagagcaggctcctgggcactgacagagccacacacccaggtacaccccccaggctaatatggggacacacaaaaatatggccttcaacacctacaagtcttctctgtgtcccccatcgacccatgcacatcaccccaaccctgctctgccacaccacgtgggtctgaggagcactcctaccccccggctccgggtccctgacagacactgccctcctggcctgcacctggaatggcagccagaacactggagggggacccacaccctctctccctgggctgtggatgggtgttgcaagtcccatccctcctggcctgcacctggaacagcagccagaacaccggagggggacccacaccctctctccctgggctgtgggcaggcgtcacaagtcccattggtggggaagaggctgagggctgagacccacctcagtgaagagggaaacgtaagcagggagagcatcaaggcgggaggcagcctggaaacttctagaagagggtcaaggtaggaggctacatggaagcttctagaaggcagtaaggaacagggtggtgaaggagaggggagaagatgggagcatggagagacgaggtgagtgacagccaccagcagggacgggcctccaggcaacacagaggagctgggggccagggccttacggggctgggttcctgtgtggggcgtggagctggggctgaagtggaggggacggccctgcggcccccagcactgttgtttctccaggtgcaccttaccttcctccttacctgcccgagcctcaactcagggtcagcagcctccacggagccagccccacctgcccgaaaaccactgaagccaccctccgcctggactcaacagccgccagcaagctcgcctggcagtgcccctggagcaccattgtcgctggggagggagagccgggaagggtggagaaggaggcagaagggacatgtatgaaaaaaggacaggaaacctgaccagaggcggtttccagagccccagccttggagacaaggacactgccacccagcgccacagtcagtctgggaggggcccacgccccccaccccccatgccacactgccgcctcttgctggccatggttctccggcttgggggaacgcaggttcccagctgcgcccctcccccgcgcacacacaccctcccctgtccctcggaaagactaggccagggtctggggatgggattctgctgccaggggtcctgcctgcccccactcaccccagacgcttcggatgctgcagctcctggataatctccacaggactcggcttcctctcctcaaatgaataaaggcctcctacctcaactccccatggctggcccctccttggccaggtgtcgggggaggacacagtgactccccctgcttctccagctctggggaaggtgggttcccttgcccagtagctggcatggcccgtctccctcctgcccccagcctgggagtgagaagtggtgcccaaaccatggaccctaggccccgtggtccggcagtgggaccatgaccatggtatgatgataacaacggggctaagccttttcaggcacagatctctgccgtactctctccacccatttctgttgaataaccgagtcccagagagttcaagtcacacaggtcacaggtggtggggctgggctctgagtcctctgtgtcggacttttttttttttttttttttttttgagacagagtctcgccatgttgtccaggctggagtgcagcggtgtgatctcggctcactgcaacctccgcctcctggattcaagcaattctcctgcctcagcctcccgagtagctgggactacaggcggccgccaccacgcccagctaatttttgtatttttattagagatagggttccaccatgttggccaggctcgtctcgaactcctgaccttaggtgatccgcccacctcagcctcccaaagtgctggaattacaggtgtgagccaccactcctggctgcatctgacttttaatccctgctccttgcagctcctgaattatgatgtgggcacctggggcagtgggaggagagaccgaggtcctgatgccggcccatccagttctccttccagctctgccgctgacatctgttgagccttggtgggcccatctgtgaaatgggactacatttctgcagtgaagggtcccaggcttgttgtgacagccactgagacagtggggaggaaagggctttgtgagctgagtggggtggggaggggaaagcaggagattattacagtcgagatcgttagtatggaggctggatatttcttcagagtgaaagtgagtgaccgtggggccatgagggtcccgcagggcagctgggtcctggccccttcccgactcaggctccttcctgtatgggcatccgttgcctcccctgcagggaccagagcggctgtttcttttccttttcttttcttttttttttttttgagacggagtctcactctgtcacccaggctggagtgcagtggcgccatctcggctcactgcaagctccgcctcccgggtacacgccattctcctgcctcagcctcccgagtagctgggactataggcgcccgccaccacgcccggctaattttttgtatttttagtagagacggggtttcaccatgttagccaggatggtctcgatctcttgacctcgtgatccgcccgcctcggcctcccaaagtgctgggattacaggcgtgagccaccgcgcctggcccagagcggctgtttctcatgctccctaaagctgtgggcttccctggggacatcagccggtacccctgtgttatatggggaagctttcacaggcgaccctgcaagaagagggattcctcaactcaatattttaaaagtttgaaaatccctggacaagctcaccccacgggttcgttcacccagcagccctgcatgagagtcccctgtgtgccagctgtggtgctgggcttccagcctctgcccgcccccaccctcccgagaagcctgcagcccaggcgggaggcagacgctgagctcttaaccttgacacgcggtgccaagtggtgtggccgggagcacaggggtgaggacccaggtctgtgtggcagtcccaaaggtgccaaaaggggatggatgcagctggggtggtgcagctggggtctccctggcgtggagaggaggagcagggggtcacattttgtgaggagggggcccttctaccgcctggggatctcctcccctggggacccatgaagactccatccgggggactgaggtcttccacgctaaagcgtgaggacggcgctgttagtgctcctccctgtcctggggctgccatctctgcccagacctaggtccgcctaccccctcgggacacccatgcccctcccggctcctttccgggttcctcggacctgtggggcgtcgctgacagcttttccagaacgcgggcgacacctagtggacatcacgggtcacaaccggtgctccactgcacccctcccgcccctctgccctggacccagagtggaattctgttgagggcctgccccaggcccacagtgtccaggagagcacaggaagccgtcagtatggcctccaccatcctctcattgttgtcatcaccgcctctcgagaagcgctgcccttaaagcaaacagcacaggctgggtggcaccctggccctgtccctagcgggcagtgtagatgtggcaagtcgcttcacccctctcagcctcagtttcccccttctgtaaaatgtggttgataatgaagcacaccccatagggtttgaggatgacatgagctcagggatgagaatgcccctagcatagggcctggcgtggagaagggaaattttctagagtgggtgactggtgccctgggcaaaagaccttcaggtcggggtggcagacagcggcaggtagaagaaggtgttgctgatggaagtggactgcctgtgatattcttccccaaacagaaaactggcagaagcaaagctgttatttagcaagacaatctggctccctgcctgtgagtgtgagggggaaagggagcgggtgggaggaggaggagggagaggatgtagaaaggaagggtctgtggacccttgctgtccctaagccatagccaggcacccggggccttgactgaccctgcccccagctgggcctgagagccgccacttcctcggcccggccctgactatgaatgcagagaggcagcccttcctccagaggctgccgcagtaacactagctgttggcttccctagttgtggcttcctgacaagcagctgatgccacccactgtgacaacaaggaaagttctggagaaaaacaccaaggctcctagcaacaggagacaggggtgcacaattaaaaaaaaaaaaaaaaaagacatattgggccaggcgcggtggctcactgctgtaatcccagcactttgggaggctgaggcgggcggatcatgaggtcaggagatcaagaccaccctggctaatacggtgaatccctgtctctactaaacaaaatacaaaaaaaaaaaaaaattagccggacatggtgggggggcgcctgtagtcccagctactcgggaggctgaggcaggagaatggcatgaacctgggaggcggagcttgcagtgagccgagattgcgccactgcactccggcctgggtgacaaaacgagcctccgtctgagaaaaaaaaaaaaaaaaaaaaagacacattgccctgccaaagtcaacccccctaaaacacccatgctctgccaaggaagggggtctgtgatctcaggatgtcagggcccaagtaagaaaagcagagtgcatcgatcactgtgcccagagctctgtgtgtcctctcatttaaccctctcagcagccctaggaggtgggtgaggagagaggccatttctcttactgtctcctgtctctgaagagaaggaggaagtaaaagttgaaaaacaacaggaatgaagtcagtggcaagaccagccagtgccactgatgaccaggcctgaggttaaaagtttaaccacctccccccaaccccgccactctaaccacatgtgctctcaatctaccacgaccatttcacgtggaaccccttagaggtgtaagcccttaaaacggccaggaactctgtcttcggggagctctgttcttgagacgcgagtctgccgaaactcccaggcgaataaagccaaatccttccttaacctggtgtctgaggggttttgtccacggctcatcctgctacctttcttagttccctgaccgggaaatcgggtgactgatggacggtggaggcagccccttaggcagtttaggcctgccctgtg

SEQ ID NO: 95749 - DNA, 46271 bp, Homo sapiens
gctaagcacagtcaagcacttaagatatgcaaaatacagtctttacccaaaaagagttacaatctgataccaattgcaataagataaattgcattttttaaaaaatttaaatactacatgggctcatgaaaaataaactttttaataaatattacatctttttctaaagatcaagaatgatcccacagtgaagacggtagaagatatgaaaaatatatgaaaaaagataaaggcattaacaggtgataatgagaaaatgacaaaaatattaaggcaaaataacttgtaaagtaatccagcctggaaattaaactacatccaggaaatagtgagggacacagaacaagagctttgtcagaacctgggtcttatcagatttaaatgttaagagggaggagcgaaaatttctagcttaagctcacacatttatagtcctctcttctaaaagacacagtaaaggacctttaaagcataagccagaaaaatgaaaagaataggaggggtgccatcagcagacaaaaaatttcaaagtatttccaaaggatccccagcaaatcagagaagcatcaaaggaagccatgaaagataaggggctggtagcagaaaagaaagccaagctgccaaaaatgatccaggaaaggttccaggcttagaatctcaggtatgaaaaatgacagcaaggagaaacagctgaaacaagggagaatagtaaaatatttatatacagaacaggtgaccttcttacccccaaaataatatttttataaagaaatataactaactgacagggagaaatactgtcactatcgccggaggcaacacttctctctacataacattttaggggctactatgcccagcagagtcatagacagcaaaggaacagagttaatatacatgttaatgtcttttaaaatacagtttttcatttattcctgcttgtgttgaaaattaaaatcagaaacatctcaaacacaggttgagtatcccttatccaaaatgtttgggaccaggagcgttttgaattttccattttggaatatttgccttatgtttactggctaagcatcccaaatctgaaatccaaaatgttccaatgagcatttcctttgactaccatggcactcaaaagcatttcagagtttagattcttggatttgcaatgttcagtttgtatttctaaactaaggaaatgaaaaagactcttacctcttgctttccgttcaaactagtaagcaacactggtcgacctatacatatatttgcagacttcatagtgttgagtccaagatgaataagggaattctggaatgttttaggaattttgtcatctactatgaaggaaaagaaaattatttttgtactactttgtaacagaagttaaggcatgctttcttttgcagtaaataaaaatactctaaccatataaccacatgaatgtacttaccataccctggagaaactagtgttccaacttttgttataacaaaacagatttaaaatcaaatgcttttgagggtctactggcaacatattaagtattaactaaaaagaagatgttttatggggtgagtattggtttctttttttctgagtctctaatttcattaagaagtaaacataattgcaaaagagagtctctgagctttaagttcaaagttgagtcagctactagtattcaaaggattgaactgggaactggcacatctatctggctctagaggattaagttatgtttctacttctgccccacattatggtcaccagatctttttcttttgtattaccaagaatacgtaaagatagtaacagaagtcgtcttccttatacgaacacacaccactagtgatttcaacttttggctgaaaaagggggtccagaattcaggccagttaacaacacctctgaaaatgatgtgctgtcatctccactcctttctatccaccccacccccaccaagctccatatttagttaggtgtccctcctctaattcctccagcactctgtgctgccagttaatagcatttaccataatattcatttgttttagtctttctccttaattgtatactgctttgaagcaggaattgggtcctatttctctctgtatctccaatgcttacagtgcattaaatatagcagttgcacaataaatagccataaaatgaataaatgtagtaaataagtatacaatggttttcttttcagcacaaaatctatgaaacacttagagaatttaaaaatgtcacaacttcattataaaatttattgtaaacatatataccataatcacagagctctacctaagttttccttaataatcagaaaacagatattctgtaataaaaaagaaattaaatcaaggaaaggaaaaccataaggtacccatatgatttacattattctgtcactacaaaacaactccccaacacatttcttttccttcttatatgaggtgcaaatctagaaaaacaaagcatctcacagagctaagatgaacagcactgagtataaaacgaaatgaacacatactgcataatacaagaagctggacagaaattcaaccttccaatgagcattagttctcttacattgtttgctggtcattaacagtaaagcatactgctgttagatgatctcataatattcagttcctgcctctttcttcctaaacctcaatgaactatctttccctcttgacaattaccacacaagtgttctcagtccttcccaagactttagttttcttcttctccttccaccctatccagcacattctccatgtcccaggatttattctccaccttgtctttcaatggtaatcatgttcaaattcccagccactggtctcattttccaaaacatcaccaacgtgttctctgcttacactatataggtctactcaagttgtccacacagttcccttctcacctcactcctccaatactttaaaaatatgtcaacatctaatttccccattaactactttcacatttattgagcaccttaagtatcacattaactaacaagatagtaaagataatttcaaacaaccatccacccttcatttattcattcagcaaatatgtactatgtgcctactatatgaaagatactatgctaggcacttttgttcacaagtccttggtctcacagagtttatagccttgtaggatgagtgagttattaaacaatcagtggatagctgtaaaataataaactaagattaatacaatgaaaaaatgacttagagtgccaggagagccatgtgggatctgacctaatttcaaataagagaatgtttctcaaaggaagtgatgttaagatcaggtctgaaagaagagtaggaactaactaaatgaggagaagaaaaagataattctcagcaaagaggacagcatgtacaaagttcctgggcagaagggggtatggcgcatcctcaggagagtataggcagagtggtggagacatagggaagccatgtaaagaaggtcaagaccacccaggacaatagtgcaataggctgcatcaagatgctggtcattactctgacagcagtgggagcccagaaagggatgaaaagcaatgtcatgacaagatcttcatcttacaagatcattctggctgcagaatggaaaaggaataaggggcaaaattggaagctggaaaatcagtcaaaaggctgttgtagcagtccaggtgagagatgatggtgtctgaaattaaggtagaaacagtgggaatggcatgcagaagaggaatatgtaaaatatttaggtaataaacatgatttagtggtggactaggtatgtgagatatgggggggagagtcatggatgactcttaggtttctgaattttgcagcgggaaaaactgaacagagttgaagtttattttgttggaggaaataacgggctcatgaagttagtcctgaagtatctttgggacactcatgagaagagttattgtacagtgctattcaaaatatgacccacaacgatttgttactgcttcatgacaagtacaaaacaggagaataagtatatagaagcttttattgaaatttacagagtaatttcacatctgtttaataaaaatttttccttatttttctagaaaatcatttttactgtattttagaaaagtgccgatctgtgacctattataaattttaaagtcttcaccacagagagcttgagaagcatttggctaaaaggcaaccacatcaaggcgcaaaaacaaaagatttacaaatataaatctgacactgaagagactatagatgggaaactctgggcactggatgaacttgccaaggagacaggatttattgagaggaaaaaaaaggttttggactaagaattgacgaacttcaacatttaatggtcaagggaagaggacgagcctgcaaagaaaaatgatgaaacatcaacaaagatgaagaaaaccaggcaagtttgacaacacataagaagttaagtgtttcgagaaggagggaatggtcaacaataccaaaagttgctgtggtcacgtaaggtttatcaacacggagatgctcggagaccacaccaggaacagtttccatggaatgatggggtggaagtcaaagaggaataggctagggagagtatgtaagtggtgaggcggcagagaccactccattyaagaagcttggcaatggatagagagacggttgcaggaagaaaatgtggagcttttgttctgatttaagatggaagagaaatgagcatgtttacatgtcaatgggaaggatctagttcaaaaacaagttgaaccttcaggacagaacaagttgtcctctgatacctaaggcagagtgaaaataccatgtgaactctaaattgtctttaaggtctgattagacataaaagtttttgccactagtctggtccatttttcaaagctattacacatcaaatataaattttcaatttttaattcaatttataagacttttcagtataaatacgttctcccaaatcaaaggagctgtcatctaggaatggcttttaagtcaaacacatctggactcaaatatcggctctgccacttagcacctgtgtagcctgaatggaatcacgttaactttcctccctctataaaactgtcattactatacccatcggtcacggcttctgtagaaattagatgagctatatatactgctaacactagtgtgcagttactagcagttattaaatatcataacctgcgtagtactggaagaaaatgctatcatcactcctaaaggcagagtgatccacatttttactgaattggttatttagttttttaggataagtatcccatgttcgctagttatgaacaattttgcaattaaatgtgtcgttaatgttaaatgagacaaagcgtttcaagtgcaacttaaaaattcaaaataatttacaaaagagaaaccttggacacggataaaccatttcagcctaacttctccagtgcaggcgcggctacgtttgcatgcttcttacatacagaagtcttacacgcttctgtgccgctctcagacccatgccacgcccaactttcaaaagtctctgcaccccaagtcagtatcactgagtctcccgcccctcaggttgcgccccctcggcctctagtctcccacccggaattctttacccttttctaataagttggtcaccgtcagagtcccggaggttgccgcgaagtctgatccagcagaaggagcccgtgcctccgcacaagaggaagcagcagagggcaaggacgaaccattttccgcgctttggttcaaccgctttctattcttcttggaagacatggtcacaaggtaccctagccgaagcagtagaaaagccgactcaatgtgcgcgcttcaactgagagaaaaacttccggggcagaagtcagcgagggtccgcccctgcgccgtaatcccctgagtggagcgcagcagtgcacagcgtggtgggagggactgagcgttttcaaaaccagcagtctttgaaacagctgtaacggcatctgtgaaagaagataggttccaggaacggaactgccacttagattgtaaattcctgaaaaacaggacgtttttgcatctcctcccggcttccccatccctaaaccaacgtctgttgaattaaactaccaaacaaaataagtgagtggcggtgggggaggaggttttycccgcttaactggagcggggcaaattgctgagaagggctggtggaccacttcgcggtctccttggcatagctctgcagagtggtaaccccagctcaactctgagggtattgatggcactcttctaaaatgtacggccgcgatctccgctctggagcgcggaggggtcatttgggcaacggacgaatyaagcggcgtggagatgcggcagccrctgagctggggccgctggcgcgcgatgcttgcccgaacctacggccccgggccttcggcgggttaccgctgggcctcgggcgcacagggttacgtgcggaatccgccagttggagcgtgcgatctgcagggcgagctggacagattcgggggcatctcggtgcgcctggcgcggctcgatgcgctggaccgcctggacgctgccgccttccagaagggcttgcagggcaagtgcgcctgggacgaagggctcccggggctccagagcttttctaatgaaataaccgcggcccccactccctagtcgctctgtgcaccactgtcgagcccagagggaaagggagaaggcacgcgtgacctggacctgttttctggagcattcgtgcttagaccttttgctgggaggtctctaaggcggttgggtgaaatggtgaagatcccggactttgggatctgcaaccctggttgctggtccactttctactgtgcgacattcggaaattgccgtaaaccaccatttcctcttccacagaccccggtgataagaactcctggaattactgagagttaatttggataatgcacataaagtgcacagcacagtgcctgccacgtatttaaagctcagtagatgtttgttaatattatattattacattattagtatcctttaccgagccttggttctgtcggacacttttcccaaggaaaaaaactcttacattctaatacgggtggtggactgagtggaccaaagaggcttttcttttttatttttaatttttgtgggtccatagtaggtgtgtatgtttatggggtatatgagctattttgatagaggtataaatgtgtaataattacatcagggtaaatgagatactcatcaccacaagcattcaaccataatccagttactcttagttatttttaaatgtacagtttgttttttttttttttttttttttgagagagggtatcattctgtctcccaggctagagtgcagtggtaggatcagggttcactgcagcctccaacccctgagctcaagcaatcctcccacctcagcctcctgggtagctaggactacaggcgcgcatctggcttttttctattttttctagaaacggtgtctcactgtgttgcccaggctggtctcagtctcccgggctcaactgattctcccgccttggcccctcaaagtgctgggattacaggcaggagccactgcacccagcctgaatctttattgaatatagtcaccctgttgggctatcaaatactaaaccagagaggttcagagtgtcacatttgtatacaaattgggtcaacagctgtctcagcgagaactggagttttttagaataacgcttcttttatgattaaccagggacggtggtgggtggtttcagtcttcaataagaaaactttttactggctttcaaccttgagcccaatgataagaaagcttggatggaggagccttcactttgraagaagtcgatttagtggtgcagcagtttttcaaacggcctctgagggttttataatctaattgaaggcatagcatgcaaattcaactatggaaaaatctctcacactggaaactcaaaataatctttatcctattgagcaatatggcaagaagcatatctgtaaatataattgagctagttatttcaatgtttactcatcctcattcccagacttcttacctcttcacattattttctctcctacttgctagtaattgctgacaagcccgcttatactgcaacagtgtcactaataggagaatcaatcgttttatcttccagtgtgtgggtagacacaggtgttgtacccactgatacttatcaatgaccaaacaggtgatcaaagcactaccccagtcagcatgacaaagcagaaagctgtgcgatttggagatgcacattctgggtttaagtaccaggttctgccatgtgcttagccaggcattaggcaaattgccaccaaaaatatttgcttcttagcttgctttttgtgaataacgccagctctaattactggatagatgcgttgatcaaagatgaaactaatttgtaaacttaagtaccaaatacttgttatattttttcaataaaacaaattttgttgcacttaatggtagatgttttaggatctttataaatagtaattaatcctcctaacaaccctttgaggtagatagcattattattcctattttaaagataacagtagtgaggcacagagagaaaaatttacttgccctggctctacacctttcttactgcactatgctaccttgaagaactcctgctggttctgttgttataattgaacaaaactaactgaatggtagtgcctataaagagagactatttacacatgaagtccgctattcttagtctttatggactaagaagtccatattcttggtggaataagaagtcaactattcatattcttttagaacatgaactattgatgttttgttaccaacaactgaagttagagggataaacaggcaatatgttgttagcttcacacataacatatctgcatcagtaatgaaatagcactggttctggtccctgctatgccactcaccagctatgtgactttaggcaagccagtcatttcattagtacaaattgagccccagtgcataatgtagggttaccctggaggattgcaaatgcatggaatattaaatagrattggaaaaaatagctaatggaagagatatcattaggtcatatgtaataagttctaataaattgtacagacatagtagtctttaaattcataatggtgagctcatgagcagtggttaggaaagactggtcaaagatgtggaatatgagctggactttaaaggatagatattagcaatgggaatgggaggtgagggaagaaaaagcaataaagcttattagggaaaagaagaaagcaatttaaaaatgattctaaggtttcaagcattggtgccagaaataaataagcttataaatgaagctagtttggggtgtaagattcagttttggccaggcgcggtgggtcacgcctataatcccagcactttgggaggccgaggcgggcagatcacgaggtcaagagatcaagaccatcctggccaatatgatgaaaccccgtctttactaaaaatacaaaacttagctgggcatggtggcacgcacctgtaattccagctacttgggaggctgagacaggagaatcgcttgaacctaggaagcagaggttgcagtgagccgagattgcaccattgcactccatcctggtgacagagcaagactccgtctcaacaacaacaacaaaagattcagttttgaacacactttgtgaagtctgaagtggtaaccttcaggacaggaaatgtctgggagcaactggagaacagaaagtttagtgttcagtgaggtcagggctgggcagccatcctcatgtatgtatcagctgaagcagtgagagtggattctccaagacacagagtgtagatataaaacagcaagcaaatagcattgcttttagaaagtagccttttaatttgattggaaggattgcctgggaaggagcacatgtgaaatgtatggagtgatagaaatgttctataatgttaaagtgtgttaygggcatatgcatatgtcaaatcgcatgaaatgtacasttaagatttgtacatttcactttatgtactttacctcaatttttaaaagatgtcatcagacaaagagagcaaggtgagaaggacctgatcccataattccactgcatgctaactcaaatcaggaagtctttattaaaggccccatgtgcctgtcactgtgctaggcacagcaactttcaaagaggtagagaacattgtccttaaagagaggagcttcctgcagagctagggaaaagagaagggaaagttaattaactatttgatatataatcaacccccaaagacagacacacacacacgctttatagcgttattataaagattaagtgagatgatggatgaagaaagtgatctgaaaagcttttctaaaaactctaaatctgaagtatttatttcttcacccataaacttaaggtagtaatacctttcatggttgtgcacttaatgagataatatatataaagtgcttggaacttagtaagtttcaaatagatattagcatctttttcccctggctcaatcttaagtagtaaagagaatttaaagaaggcaaagatagaaaacctataattatgttcaccatgatattatctataataaggaaaaattagaattttattcctatatgctagtaaaatgtgaagtttgatttcttcatattttttattttcaaaatttctacaaccagcatacattatttaaaaacaaagtttaactaccttgaaatttatacattaaaaacattataacagaactcctaaaggaagaaaaaaatagaagtccataattgtctttaagattaaacctaaggatgttaaaaggaacagcattcaaatggtatttgattcggtttaaatccttttatttgtccactctaaaactacagaacatctgttacgtgccaagcattgtctttggtggtatggatataaaggtcagcagtgtaatgactttattcygaaggaattcagtctgatggaaaaatcatataaacaaggtggttactataaaacatggtacttccagtgccagcgatgtgaacaagacatttggggacctcttttgcttaaagatggtttcctggaggaggcgaaaccctgaggtgagttttaatttattccactcgtctctttggaaattatttagacttttttcttctgcatttagctgcagtacagcaatggcgatcagaaggtagaacagctgtatggctgcacattcccatcctccaaagccgatttattgcccctgctgcttccctgggcttcygctttcaccacgcagaatcggattcatcaacgttgactctgtggctgagagaagggcccagcagattaccaggatatgcttcacatcaagtaggagttgcaggtcagtttcaaactcatgatgagcagaattaactttttagacgttcacccaatttcttgcttgttacagctaagcaaatagtttattcatgtggaatgagttatttgattaaatgattacrgtggttccaccctatctgcacaggatgtgttccaagacccccagtgggcacctgtaaccgcagatagtaccaaaccctatgtatatwtaccatgttttttcctatcacacatatttatgataaagtttaacttataagttaggcacagtaagagattaacagtaactaacaataaattagaacagttataaaagtatagtgtaataaaagttatgtgaatgtggtctctctcaaaatattgttttgtattcacccttttgtattcacctgcacgatgaggtgaagtgaggtgaatgacaggcattatgacctaaatggaaaattccagaaaaaaactcttaagttttaaattgcatgctgttctgagtaatgtgatgaaatctctcaccatcctgctctgtcccaccaggccgtgaatcttccccatgtccagtgtatccatgatccataggctacctatccattagttacttagtagccttccctgttatcagatcagctgtcccagtatcacagtacttggattcaaataacccttattttccttattaatgccccgaagcacaagagtagtgatgtaacactttgagactatggttgaccttgtataactgaaatcacagaaagcaaaactggacaagggggactacagtatctattacatagtgcttttaaataggactattacatagtgcttttaaatagatgaagtttgcctcaatcagtagacagacgcacagagaacaactttagtgtttagttttccaaaggatatgcttgaatatattttacacatataattaaacttcactactcaaatagtagcactgaattgggatcagggaataaatttattgcagagtaaaacatgttggcactaattatgtaaatttgtaaagtaaatgatcatttttatgttgaatttcaggtaaagcaaaccaatttttcaatgatttgaacaattacttcttaataatatttacattattctgccaaacagttgtttaaaatcgtgtaatttaagtgtagagtagaattttgaagtggctgattagcttcagagacataggaaagttgagagaagacttccctcagagtaagacacagattctcacattgtagattgcatcaaaatcacctggaatcttaaaacagattgctgggccctatccccagagtttctgattcagtaggtctatggtgggacctgaaaattcaggtgatcttcctggctgtttctgtttttgctgctgctgctgctgctggtggtggtctcagtactaccctttaaggaccaaaattyttagatttctagaaaaactataatagtaagggatccttatgaccttaataaatgaaagcaatgaagcatattagttatttaattaataattttatttgcctttatataatttacaagagtttttaaggtagtttgcttttcaaggcttttcaaggagttgttcaagaatgcctaatgatgtcttctctgtccctgtcttacttccctgtagcaagtagacattcagaaactctccgttcagctctatttcaaaagattctactcaataatttagtgacagcctcacacttcaatggaaagttatrcaaataattatcattcacgggcacagactcttaagagttcccagttattactacagaattggtaatatatgcaaaaagagtatcctatgaagggcctgttgataactaagtactatattgtatattgtacattatagtttagagtgtcagagcagttcaaagaataagagatgcagaacttgaccaatcttgaacactaactaggatttgaagccactgttgggggtgtggacgaggtaatgtaagaaattgttctggaaaggtgcagagttgttttttttgttttttgtttttttttttttttgaggcagggtctcactttgtcacccaggctggaatgcagtgtcatgatctgggctcattccgacctccacctctttagctcaagtgatcctcctgccttagcctcccaagtagctgggactacaggcatgcgccaccatgctaggctaattgttgtattttttgcaaagatagggtttcgccatgttgcccaggctggggtgcagagtttttaggtggaaagaaaaataattggcatttgttataaactaccgaaggcagatgtggctggaatagctggagccattgctttcttttgcttttcaaacttagcaagcttgtgtctgactcagagccttgacatctactggctcctcttcctgcagcatgcttctccagaactttctttatctagttcttcatagccgaagtttctgctcaagtgtctccttctcagaaaagcccctgacccttctgttagaagtgacttctccctgcacactagtgccatcattccttgtccctttatccagctctatgtttctttatggcatttatcacagtctgaaactctattatatcatgtatgtaaattaattatattgtatcacttaatctcccccacaataatataaactccataaaggcagatattttatctgtcttggtcaccacgatatcctcaagctaaagacagcgagtgacataaagtagatattcaatatttttttaatgaatgggatggaaatgtgagtcttctgagagagmagtttcagtattgttgaggggcagcattgcacagtgagaagagtgtgcctgcctagaatccagacagactggctatcagtcccagttctaccagttagagctatatgaagccagacactcatatcactcacaggattattgtgacttatacctgagctaatgtacgttgaagcacagtgcctaatcataataataatttttatgttgtgaccagcagaggtctctcaaattgtgctttagtggtgctggttttgtctctgatactgtgctcatgtttacagtgaattcattagggacaagttcaatttgagtaaccacaaattattaaaatttaagagtaagtttccttggcatttctttggcagtctacctcttgtaaagtccagttaaattatagcttacattttctaatagaagccaacattaatgttaattatatctcacttggtgattttccttcctgctttaaaatagtcaagtgtggtgttttcatttcaattgcatttcaattacttttccccatgttacacatatttattccttctctatattctacatagcatttatcaccttctaatattctatataatttattttttgtttgttttggcgcctccccacacacataccagaatgtgaaccccataaggatagggagtttcatttgtgttgttcaccactgtatctgtagcacctagaaaagtgcctggcacatagtaggagctcaattaatatgcacaggatctatgtacattatatagaggaactcagttaatactgaaagcatggacaaatatgtagaaagtatcttttaaaaaatgtcatcccacattatttaaatacaagtaatgtttaaatcataacatctaaaagatcataataaaaatcactaatacgtcatttgtatttttgacccaagattgcccaaagggaaatatttttaaaaagaaagagagaatatgcaatgtgtatgatgaatgaataaacaaaaaaaaatgaactagaacttaaaacatatataaaacaaagaactcttccaaagcagtatattagtagattataaagttgtgtatatacataataagaaaatttaattggcttcagaaaggtcttgaaatgaatattgagatatttgagatttggatcatcagggggcacagcctgtgttgtatgcatagtgattcaaggaataaaaatgagaagtsaattcatttattcaataaatattgtaagcacatctgttgtctgaatgtttgttccccctaaaattcatatgttgaaacctgatccccaatgtgatggtattaagaggtggggcctttgggaggtgactagatcatgagggcagagctcccatgaatgggattagtgtccttatgaaagaggcctacaggagcttgtttgcccctttcactatgtgaggacagggctagaaggcatcgtctgtaaagaatgagcccttattagacactgaatctgccagcaccttgatcttggacttcctagcttctagaactgtgagaaataagtttgttgtttataaactatccagtctgtggttattttgttatagcagcccaaatggactaagacaggcacttagtgtcttcatggatgaggtggtggtacagcttgaccatccccaatctacaaatctaagatccaaaatgctgcaaaatccaaaagtatttgagcactggcatgatgccactagtggaaaattccatacctgacctcatgtgacaagtcacagtcaaaatgcagtcaaaactgttttcatgcacaatattatttaaaatattgtataaaattgccttcaggctatgagtataaggtgtatatgaaacataaatgaatttcatgtttaaacttgggtcctatccccaggatacctcattatgtatatgaaaatattccaaaatccagaaaaatctaacacttctgctctgaaacattttagataaggaatactcaacctgtatttgaaccaaggcttcaagtatgggtagaatttttatcaccacagatagagagtgtgggaggagattaaggtgaatgaaattaatatttctcaattatcttttctttttcccctaataggagctgtatttgatgaaagtactagaaaaatactggttgtacaagatcgaaataaagtaagctgcttctgttttataaattgcttcctaaatgtttatttctttctagagaagaataaaatatagaaattttaatatgcctaaggggttatagaaaggtattttaaaaatcatttctaagcagttatggatcaccttagatattwatttaaaccaaactacttatacagaccttgaaaatttccaggtaacactcagtgttamtatctattactttatggctaaaggaaaattataaatgactgtatttaattgggaagacaagtctgctttaatatattaccaagatattcttccattcattcagcattcaatgagtttctactctgtgccaggtgctgagaatataaaaagcagtaagacgatataccttatgccctgcagcttactatttatttggaaagacagtcatacaatagatgacagcaattaactttgcctgaagaagtccccaaagacttctcaaaggaggtgaaatttaaactaggtcttgaagaatgagtaggagctttccaggtgcagaagaaaaaaaataaaaaacaaactgataaaattcgaattgcttrtacaaaggcacagagctcagaaagggactgacatagtttagaaataatggtaaaaagttcagtgtggcccagaatatggacagtggtaagatatttgacttgagagctagattggaaacaatgtgaagaggattggataccaagataaggagtctaggtgactagaagcaacaaatatttcccagagaagtaccgtgattagggatcagatgttttcatgctcaggagtcagaagtaaaagtgaaagagaataatgattttgatactttctgagacttcagcaaatattagtggacatagtcaaacatttttccccaccacatatgttcttaaagtttaaattaatgtttgtaatgatagctgaaagcagtgtcacayatttcttggaaatgctatctaaaactattcttatggctccaagtaactttgaagttttcattaaggcaggatctctgattcaaattaagctttttgtcctcaacagaaatttatagaacacctaaagtagtattgtacctagccctcaataagttttatatttgaattgggacatatatatgtaacggttatgaccagagagtaggaggcattattgagtggtaaaagtagggcctagtcatgagaaccaggcagatgagtttagacttgacatggaaacagtaactattaaaagattttgattgtgatgacaaaatgatgaagatgatatatggacaaaattaatctaataacaatatgcaaattagcctgacaacagtatgcccaatgagagggagctgatatgaacaaaatggacttgggagccagactgaccagagttccaatccctttgmcacttctactttgtaaagttggcttcaacccagagtggatattataactctctccaatatagcagatagatgatatgcccgaaatactgtatgtacaagtaacataaattgattaatttcttttgttatgtttaaaacaaaactatactttggtatgtagcagttacttctaaagagataccataaaagggttttactgtcttctaagtatatccctttaattatctctcttttcatttaaagaagaagtagatcaccagaatttatttaatctttcctgggctcatgtgaatgatgttaatgagacaaaacggaatcagcagacccgggtccctaggatttggccatgccattaactgtctttctgactctggggacctaagtttccccatttataaaatttaggagttagactcaatggtcaaacaaaatattgtaatacttaattctatgtatcttccatgtacatagcataaatacttatacaatatatggataaaatgtgatctaagccactttggtagtatggaaagaaaagggtaaaccatgaaggttttttaaatagcacactgggtttcagaagtgattttgtcaaataaaatttcattatrgactttaacagaggctgaaagacagccagataacatgattgtgccactccaagcagtccttcagggttggttaatctaccaaataagaatctagccatgttattattcatgtcataaaacacagaaattcatagaaaacaaacttgggtatgttaatgttaaaaactgcattggaatctggaaaaaaaggagctttcctggcagatatagctgaattgtcttactccaaacctagacagctttatgttttttgagtagattttttgtttctttataaaacctgcaaagacaagtgacttaacaggttcagcttacagaaatcaaactcccagagcaatctgtacttgaaatatgtaattgaaaaggaaagaattgagttgggctatatttttaaaacagggtaatagtgaaaactrtgtttaataaatttgcctgaattccaggtaaaccactaaaacttttatggttctctgttaatcatggttgcacttaatgcgtctctagttttattcatcttagtttcaaataagtgaaagtgttttctgaaatgtttcttagtgtttttcaacatagtcagaaaacaaagggagatccagacctaatgacaaaacaaataaataggcrtcatcccattgtaggggaaaactcaatccacagtggcactgtttgcatcattctttggaataactgagttcatcctgtaatgtttacttacaaagattcaagtggagagttttccctttttccactctgagtttcttttgtatggcctttacagtcatttgaaggtcatacctttaggcttggtgactgttgagtaattaaccctagataggttcatgaatggtttatttggtggctcttagaacctgtagtcatctctaaagagaattaaaaaccttaataaagtggtagtaccagcctgtagtgcacagaaggctctgttctggcctttagcctcctaagaagtcatagccaaacatttgctaatacttattcctctgttatagcacacattcctgatcctagtttatgaggttttcggggtaaaaaaaaaattttaattctatcatgttttgctctgtcagtagaaataaaaccagataatcaaataatttgtgatgacataaaatacttgcatgaaataatttccatgaaatgtttctcatttaataatcatacttattattatctccattattttaggactgagatttagagaggttacaataacttattcaacattatgcaactagttaataggcagaatcagaagcctatagggtaatcttttcactaaacctagactaaaaaaacaacataggcaggaatggtggtgcgcacctatggtcccagctacttgggaggctgtggtggaaggattatttgagcctggaaggtcaaggctacagtgagccatgatcaagccactgcactccagcctggatgacagagtaagaccctgtctcaagaaaaaaaaaaaagctgggatggcggggagatgattaatttaaggagatatagagtaattatcagttcttctcaaaacctaggatgatgatctatttttacagtttttagaagacccaaataaagactgtagactgtaagtaagaaagaaagaagtttttattaaaaatccttttgttttttgctcactgagatggctgaacttttcagagaacacatgattcagcagttggtcctttaaaagttaacaaactttaattgttttcctttactcagagttgtttggattttgagtaagattaagtcagggtaataagagattaatttataaatcagaatgccattttattaattctgttaatggaaaagtcagactctgtaaaacatttttaaaaggtttattttgaaccaatgaatgaccttggtctgggaaatgcatctcaagaggtcctgcaaacgtgtgccagtgggcaattgaattacagttttgtttaataagtttgagggaggcaggagttacaagcagagacataaatcaatatgtggatgrtatacatttatttcgcctgaaaaggcaggatgttttgaagaggcaggatgtttaaagagggggcttactggctataggtagattcacagattctctaatttacaattgattaaggaagtgaagctttgtctaaaaatttagagtcagcagaaagaatgttttaagttaaaataaagaagtctgtcaaccaatattacactgggtcagagtgacctgcagggttgtgtgacttaacccttgtctggcatggctttagatcctgtttataatttggtatcttattgtcacaaagagtccattttgttaccttatgttaacataataatggtcagttgtgactaaactccaaaaaggaaggggtataatgcggtgtgtccaacctccctacacatcatggctggggatttagtttataagatttttttggggtccccttggtcaagagggggtccattcagttgggaggggtttaggattttatttttagttacaattcacagtaggaggaaaggatccaggctttttgttagtagaaatgaattggagagatattcccaaatatgatatatgctgcttccaaaatgtaaaaaagtattgctccaagtgctgtgagtggggatagttgcaaggtgcaccaaatcgcccataccttagagatctacagattactgttaccagaagggggtcctgatccagaccccamgataggattcttggatctcacacaagaaagaatttgggtgaatccgtaaartgaaagcaagttttattaagaaagtaaaggggccgggcgcagtggctcatgcctgtaatccctgcactttgggaggccgaggcgggcagatcacgaggtcaggagatcgagaccaacctggctaacacatgaaaccctgtctctactaaaaatacaaaaaattagccgggcgtggtggtgggcgcctgtagttcccgccactcaggaagctgaggcaggagaatggcatgaacccgggaggtggaggttgcagtgagccaagatcgcgccactgcactccagcctgggtgactgagcgaaactctgtctcagaaaaaaaaaaaaaaaaagaaagtaaagaaataggccaggtgcggtggctggtgcctgtaatctcagcaytttgggaggctgaggcaggtggatcacttgaggccaggagtttgagaccagcctggctaacatggtgaaaccccatctctactttaaaaaaacacaaaaattagcagggcatggtggcgcatgcctgtaatcccagctactcaggaggctgaggcaggagaatcactagaacccaggaggcagacgttgccgaaacctgagatcatgccactgccctccagccagggcgacagagtgagactcgtctcaaaaaaaagaaagaaaagaataaacaatggctactccatatgcagagcagtggcttgggcttctccactaaggatacttagagttatttcttgagtatatgctaaacaagtgttggcttattcatgagttttccaggaaaggggcaggcaattcccggaactgagggttcctccccgttttagaccaaatagggtaacttcctgatattaccatggcatttgtcagctgtcatggtgggagtgtcttttagcatgctaatgcactataattagcatataatgagcagtaaggatgaccagaggtcactttcatccccatcttggttttggtgggttttggctggcttctttactgcaacctgttttatcagcaaggtctttatgacctgtgtcttgtgtggcctcctatctcatcctgtgacttagaatgcctaacctcctggtaatgcagcccagcaggtctcagccttattttacctagcctctttacaagatggggtcactctgatttaaacacctctgacaactatacttctaaacacttaataggggcatctcctatcctctagcacctagatgtcttactaggacatctagaatacgtgacacttcctactttccaggtccagtcagcatgctggcatcaatagagttgggtagtgataagccctggcatatagtaacatagcagctactaagattcttacatatggaaaggaatgaggtacagatggaaacagaagtattgagtcgtttggtagccatggcactttaaaagtacgtaataataattatatagctttggagatggctagcttttgttaacttgtttagatgccttggcaaaataaaaatgacaagctcaagtcagcctgtcaattcaaggcacaatatgaataccccaagacctccatggcaccatttawagagacccctatattctccagccacaaaggcaatattgaaaatcaggcctagatccaactgtaagaatatcagagctgcaaaggagactgaatagagtttgacaagtgtcctatgtcaaagccaatcccctaacaggaaaagagtggggatcctgcgaccctgagtgaatggacataagaattttgaatttcaaattctcttgaaccctctgagccagtagaagcagcacccttcttctggctacagaaaacagcctccccttgcctgagggctctgcaaaagatagagtatttaataatattaggacagtgtacttaaaatcagaaatagtctggaatattcaggatggcaaccagaactgatgacctcttaggagtcatcagtgcacaaggaatcagatgcacaagaaatccttgtgcatctttactgactagcctgcagtcttagcctccaaatatttgttaaaggatttgaagaaactgtggaagccaggaaaccatttgtcatagatgtgttaggcactkagtgacttatcagagaataactgaatgagagatgacctctcgaagtcctagttctgtctgtgactcatgggtgggaatatgggcatagcactcctaaaatttcctatgtggaaaagaccacttttatgttggcagaggtaaagtataacagcacatagaggggtaagcaaataatgggactgtctctgtgtaacatgtatacacacagacatacatatgaatgatcatcctcattcgcattcaaataacaaaagatccaaatgtaaaaagaacctactgagtaaaatatgctatgatctaaaaccctggaagatgcaactttaatgttatagtgtgacaaaactactgagaaaatcaacttaatgtaagacattaagaaacttgattttattaataataccatttagcatatagtgaatgtttaacctgtgcttcacactatcatattgaggggtgaagccagctggacttcccagatcgagtggggacttggagaacttttctgcctaactagaagattctaaacgcgccaatcagcactctgtaaaatggaccaatcactgctctgtaaaatggaccaatcagcaggacatgggcagggacaaataaggraataaaagctggccacttcagccagcagtggcaacccgctggggtccccttccatgctgtggaaactttgttctttggctcttcatagtaaatcttgctgctgctcgctctttgggtctgtgccacctttaagagctgttaacactcaccacgaaggtccgcggcttcattcttgaagtcagtgagaccaagaacccactggaaggaaccaactccagacacactatgtgctgtatattaattacctactttaatcatcatagcaacctgtcctcatttcacagactgggaaagtcaaccaaaaaggttaagtcataaagtaagtgaggaagaggcgaggcacggtggctcacgcctgtaatcccagcactttgggaggccgaggcaggcagatcacgaggtcaagagttcaagaccagcctggccaacatgataaaaccccttctctacaaaaatacaaaaattagctgggcatggtggtatgcrcctgtaatccaagctacttggaaggctgaggcaggagaatcgcttgaacctgggagacaggttgcagtgagccaagatcatgccattgcactccagcctagctgacagagcaagactctgtctaaaaaaaaaaaaattatagaaagtaggtggggaagaaaacttttcatctaccaacttagaactgggtggaggggatgttgctacaaattaattgacaacagatagattaacaggagaaaagtttaagagtactctataaggaatgccttggccaggggtaagggtttatatactgtatagtatatcatcttaataaaaggggatacaggggtataggacttctagtgaaaacatgcaggcatagtagcttctgacaaagtttygttatgcaatttctcatctaggtgctaatggtcagtctccttcctggctgaaagcttccccaaccccctcaatcccccactcctactcaggggattaatggcagcttcattctcagaaagctttgcctttagtcagataagggaagctcacaaatgcttctttctgcatctgctgtatcttaaatatcttcagtttagagtcatcattatgccattctggtgggttgtgggtcccttcatgtgggaccatgcacagttaaaactcaaacctcttgctgttcagctggtgctggtttatctggacccagatctctgagaatgaggcatcagcttgctggtgtctcttgggaaggggatgcaaaatgaagcttcttttacaaatgttaggaaaacttcaaactggattctgctgatactatgggaaggaaatgctgctgctagagtgaagcagccttgaagcagtgatactcacaggaaccacgagcacacagaaggcccacattaaggagctagtcccttcctcctccagccttgcagtctaatggtggagcataaaagggartcagctggcaaagcagaaactggttagcagaatcccagctccagcatcactaagcaagtacagaagggcagattcggagctgagagacaataacagcatcaacttattaaaaatgcaaattctcaggccccaccccagatctgtagaatctgaagctctagaggataaagcccagcaattctgtgtttacaagccctccaggtgattctgatgtaaagtttgagaaccactaaactagcacattgagcttcctggctctgctgattttcaaacctgccaataattggtcctttaagaccaagaaagtgatgcttttcagaatctagtcatgttcmccctacacttttaggcagttggtactggtagaagctaaagaagttcaaattatataagaaagtttatttgtggattaagtaggaatgacactcctaagtagggttttgatttttttaagttataaacagagatccatcaaagagagcaaaaaaatatgaaaattaagaattaacatatagttcaatgttgtaataaaaataagaggaataatttaatttctgtaaatgtttggtgttaggtgatatttcaatataactgatagctattaatgatatgtaatttatatttaatgtttaataaattagatgtagattatatatacttatttacttattataaacaactaattggcattcttttcagatatccaagccagttgctctcctttctttatgtacctcactctccccaggcattaatgtcaagtgttttttgcagaggaaaatttaaccctcaacacgagcatatgcacaaattcaaacacatatctaaatygacattcacatgtcctttctctttccctacacacatattccagtccttcatccctaccccaatattttaggtaataaaggacctaacagtgacttaaacccataaactgggtrttcaagagttaagggtagggacccattaattcattcactgaatattactgagttcttatacatactctgctgtatacactgttctaagcactaggtacacatcagtgaacaaagtaaagtttctgcatagggagcttacattcaaatgcataagatacaaataataaaacgaatgaatattatataaggtgragatgtgttattaagaaaaatacatggtgcactaagcactaggtatacatcagtgaacagatgtatagtttccacatatggagttaagcaaagtttctacatatggagcttacattcaaatgtgtaagatacaaataataaaatgaataaatgttatgtaaggtggagataagtgttattaagaaaaacacatggtgccaagataaaaagaatgactgggtttgccatgtacattatgttcggtatgccchatatacattaacttctttatgcttgccatatacattaacttctgtatgcccaacacctaacaagcaataaatttctattgaatgaatgaacaaacttatgagacactctgtggtagcttctgtctcattggtaacagtgataatattgtatctaatgagatttatctaaatacagtaggtctgaattataaaaggcgataggattattaaagactagaacaatgaaaaataaaagataaccaaatttctggcatctgaccaagttggagtaaagacagaacaagagggtcacatatatatgagaaccaaagggaaaaggctagcaggtctgtgcccttgctctgagttctggagatatggctgaaagaaattagtagtcttttaagggttgtgtttatacaaacttctggttaggatttcagtagccatgcctagggaaggtcttaaaatgaatcctctgcttaggaaagcagatgtctgtggaacggggaaaacagaaaaagaatcagaaaatgaatcattcctttcacccattctagaaaccctcaaataaacgagtttatcttcaggataagttttcaaagaaatagtggttttaaacttgaacatgctttaacagagaaagtatcttacattctgttaatatctctaaaaaatgcatcagaaaatttaccctttcttagtagccaaaatgattatttcttgggctagcaatttctaacagtggggaaggaaggattgcagagtgataaatgagaccacccttacatcatccacactgtcttctgttttccatttactgctacacacacacaaagaacatcagacttgtaattggcaaatgtataggaaaattgtcataccattcaccattccaaaatatgatggaactaatctaaatatggtttaaaatcacatatttttataagttaaaaggatactataccttttgtagtatgtgaaaatcagatatgctttaatatggttaaaatcacatatttttataagttaaaaggttactataccttttgtagtatgtgaaaatcagatatgcttaaaggaactagacctcaccaactcaaagcagggaggggtcatatatgtgaatgttgagtagcacccaacaaagcagctaagcacaagagcattttagaatacttgtttcacaagagagtggaaagttccttttttgagattaggaaaaaaaaggatcatggaattttacacttgaggcatagagatatcatcttcttttataggaagggagaacaaagatgaaaacataatctcataggctacattttcaaaaccaatcctcagtaatttttttgccataaaacaatatactggaaagaaagaataataaaagatcactagctaagaaataaattccatgccaatcagaacattctagatggggaaatcacaagcaacagatagatacaaagacatttggcactaaactgtagtccacattcgtgagccctggaaaagtgtaagtctaagacacagaatctaattggatttacatagaatgttccaattaggtcccaggaagagattaaaaggtatatgaaaaagcagtggacagtcactaaggattagtgagaaaatatcaaatcgacttttacaatttcttaaaagatggttagaaccagcctgcctggattttaacactgagtttatcacatactagatgtgtgaccccagtcaagtgtttcatcacctctaaagtgggaacaaattatagcctctcatgggagtattgtgaagtttaaatgtgcataattcttatacaaatatttagcatagcataggagattggtcagggtggtgggaaaaattgtagaaagatgcaaaccttcttggaaggctggaaggtttacaaaagcttcggaaaaggatttccgaaggaaaaaaaggaagtttaaatgtgcataattcttatacaaatatttagcatagtgtaggagattggtcagggtggtggcaaaaattgtagaaagatgcaaaccttcttggaaggctggaaggtttacaaaagcttcggaaaaggatttggatgaaggcagccagattctcttacctggtgcctgaaagcttagtttaggtaacatggggatgtaaagaacctgatctaggtaagttaaccgttggcgcacaggactaatctctctggggcagtggtggtgggggccggggggggggtggcgggggtgcatgaccatgttaattacccacaactgtgttgactcaaggcctttgtcattaaatctgtactgagtaaatgcccgcagcactggcttgtcagggccgtggctactgcaactctttctatgagtggcccagtccccagcctgctctttcattggatatctgtgatctgtgcctgagtgcattttttcatccgtcattcagtcagagactgtgggtcagacctggcatagcgtctggggtctcactctgttgcccaggctggagtgcggtggcacaataactcactgcagccttgaactccaaggctcaagtgatcttcccatctcagtctcccaaagtgctgggattacagatgtgaggcactgtgcccagcattagtattttaatgttgttgttatattgccaaacacagctaatgggaattgtttgatataaagaaaaaaaagtgggaagacatgctcatctcactactgatcatatctaggacattaactagatttttcacaaaccacatagcttaggactgtctactgcttaagactatactcaggctcaaacttttttaggggagaagtaagcattttaaaaacctaagtggtgccataaaatgtcacaaaatacttaccagcataaacatatacctaatatttccatataaaaggtttatgaaatagtcaaaatcaaatttgtgtgagctgttttcaatccttatgtctagcattttcccccttctaataagttcatctccagatttaattaacaatctctaatcatttatggtcaaagatttttaaagttgacttttattgtttttaggaaacattggtctgctccattataacttttcttttgttagaaacagaacttgcaggctggttatggtagctcacacctgtaaccccagcactttgggaagcccaggtgggaggatagcctgaacctcaggagttcaagaccagcctgggcaacacggtgaaatctcatctctaaaaaaaaaaaaaaaattaggtgtggtggtgcacacctgtagtcccaactattcaggaggctgaggtgggaggatcacctgagcccaggcaggtcaagactgcagtgagctctgatggtgccactgcactccaggctggccagcagaatgagaccctgtctcaaaaagtaaatggaatttatggtggtaaagttcaacatcttgtcaagacaaagactgcatagtttctggagaaataaaccttctgggaatatttccaaatggaatctagaagacagtgcattgatatagaggtatatttacagatatatttctacattaataaagtaaagcataatatcctttataaattaatgtcaagcctagcccagacactgaaagcctgaattctgtacccacataatcaacagtctatggaaactctgggaaccatgccactggtctccaacctagcatagttgagaaatgacacattcttttaagaagcattcatccaggaaatgagtgtgtcacaaagcaaaccagtaaaaggaccataacttattttatgaatgaagaatatagggtactagccaaaggtacagctcccttatgagtatgttataatttctcattcttttcttttatcacgtgatggatagatagaactctaacaggaagaaaagtaatcatgtcagccataagaatattgtccatgtcatctcataattgtttttaatccatttttctatatttatccctattccaagatcagatctttccacctgcccctccccaacaaaaaaaaagaaaaaagaattcatagacaagaagacacaaagaaatgggagacaagaaaacacaaactaatcaattttattcatactactcatgaaaagcaattacatttttacataaaatcattaacacatacaatagaaataataagagtaatacatctgattagaaatacaatataggaaatagattttaaaatagcatattttagtgatgaaatttatattttctacttatttatagcagcatctgtaagattcttctatctgttcatagttaactagcagcaaaatattttaaattacagaaattcagtagatgtttccctccaatgtttcattcatacagaatgtatcacgttaaccaaacaaaaccacttatatttcctgaagagaaaaggtgggaaaagatttcatcagttaccagctcccccaaaaaaagaagaaacgagggagaaaggatggaagctagaaaaattttgcatgcaattactaaaaaatatattctcaaccactttgaccaattataggtggattttgtgaaatctacatatgtgtgtgttagtgraagttatgttaactttattttctgactttatactgcagttgaaaaatatgtggaagtttccaggaggcctgtcagagcctgaagaagatattggtgtgtatcttttatatttttaattggcttaaaaatgttgaggaaattaatgtgtttactttcttgctttatagctaagaataaaaatttaaattttccaatttgttccgactgagtctgaacatttcagaaattacctcagagctgatataattagcagcataatttctaatattacagtttattccattagtagaaataatatcattaggaacataccacctattcttctgtttatgactgcttctggattaatctgtctgaaaakgagaagctttggatatacatcagtaaagtttagcattaaaggttattttggatacgactaatattgttgttggaattaaactatgagaaaacaaattcctgaccattccatcacagaggatgaatagtagcctttaaatgaactttgaaataaatataataaagtcagttataaagcagtgattatataattcttcactttatgaaaattgtwtctactatttatttttaatagtcaggwagtcaaaacatagtaaaatgtcatataagaaagtctcaactgagaaataatcccctaacacaacttactgagctcagtatttaagacaaggaaatataaaataagctaagaattatttatgtcactgatttacaggaaatcgaaaaatagaaaccaaattttcctacctattccttaaactattggatcaaattcartgtgtatcatgacaaatcaatgtatttgtttgataccaatattatttctccatgaccttttccttaatatgcatgtcccctattctatttagccaacaatgatattaaggcaattttctaaattgtctttaaatattttatttaaaaatgtccatgtacttaaagcttgatttttaaaacttttacacaaatcaaaataccatacatacattatatagccaactcgtaacaatccatcagaaaatggattgcattaagatatatctctagccaatcttggtttcaggtacttattgaccttttgcttagtttatgcttattcttctgttgatataaaagatgattttgtagtggtgtgaatgctgaaagagaaggccatttgttctacagcctaattctctcacactatccactggtgccacgtgagagcagagcatgtgagctaattaagcttatgttttgcagccttacccaatctatattgggcaaaaagcagtctgcaggtttgcaaggcttcctctctcctgcatcttgccttttcaaataaattgatttttttcatgtgaactcttatgggtcctctgaatttcagctgtacttacttgtagatgtaattgaagaaaaacacatttccaagccaaatatatataatttcaggcctaagtatactccagaatccttcttaaagtccagatgattaaaaattcactacctttttttctttaaaaaaaaaaaaagtgcttgtggttgtcacaacaactcacctacccagagatcatatatgcctcagtcatgtggaattaagaagaaaaaaactgccgttggcattagccatacttcctaagcttagtrtaaattaaagctttgcctgaaaattcataaaaccctgaaagcagctrgaaatgaaaactgacagtagaggtctgaaagactatgtctatatgaaggcatttctaactcaacataaaacaaaagatattcttaatgatgaagctgaatcatctaagaattactgaaattatttaaactctgtatttaggaaaacatgcaatgtactttaggaatactgccatcacaaacagttaaacatttatattggctcaaacagtaaaccctagttaactgggaaacacatttgtttgaactccttcattctttcataatactaggtaaatgaagaattgttatccatagtgttttttaaatatcaagagggtcatatagaaaatagaatgcaatcctcaaggcttttgtataaaataataccctaagagtataaaggtatccacaagattaaaattgacaaactgccttcttaaaaaatcgtattaccactggcaggaagagtatctgctgcattagccagagaactataaagcagctgagccttatcagagatcatcagtgcactagagtcagagggaaacaccaggaaaacccacattctgcagattatttcccattatattttatttcaatctaattctattattaaatataacaaaatagaaataacaaatataaactccatttcattattgtcctgtaactaaacaaaacaatacaacatatttaaacatatctcttcatcagcaaaaataaaaacaaaacctcttagtttttcctatgttcttcaaacctataaaacagcaaatgttatttcagtttggcttacagtatattaaaataataaaaaatacaacagaataaagcacactatcttgattaaaaatttcaattcatcttgaaatccttggggaagaaatatccatcttgaggtggaagggtctcccgcatactctggagacaaaagcacttatttgcccattcaattttcagtcagttagtgattcaagttaaactgatcaaaactactcaggcagtgctgattttcagtcagctgctatggtgactgctgagcagggcagatttgctcactacccccatccrgtgcttccacgacatagaaacagcatagatcatgagctacatgccgaacttttgattagtggtactaagagctaaataggatccccataatttattttcaaacataaagaataaaaatggacatttaaacaagttaggagatgttatatcaaatttaagactagtgctactatctttaataataaatttaataacaaacatgtatttccccataattatttttcaaagcataatgaataaaaatggacatttaaacatgttaggggatattttatacaatttaagactagtgctaccatcttaaataataaatttaataacaaatgtattgcacatcagagtaaaaattacttttcttattaaggaaaatttctctttttttgagacaaagtctcactctgttgcctaggctggactgcagtggcacgattatggctcactgcaaccttgacctctcagcctcaagtgatcaaccctcccacctcagcctcccaagtatctgagaccacatgtacacgccaccatgcctggctattttttgtgtttttttgtagagacggggtttcaccaggttggtcttgaactcctgggctcaagcgatcctcctgctttggcctcccaaagtgcagggaatataggcatgagccactgcacccggcctagatttttcttttatgctttcagttgtttctaaccatgtttaacctatgggcaaatctcaattgtaagggaagtcagcatgtaattgaaaaatggcagacraatgccttatgttttaaaacattatactctttctatgcatctttccatagctattagagggaaaaaacaagagcatatccaggggatgggtaagacagtctatggtaagacagtctacagtcacagcacatgggaattgagacatgtttctgtgacttcctcttctttgcatgtttttcaccagtagaattactgcaagggcaaatatcatttactatttgacaaacaagaaaaatagaggcaaaacgagtattggaacaaaaatctttgtctgtgacaattgtgaagctttccagcaaagtggtagaggaaggcagctttttaaagggcttctcctaaatactttgggagacaatgacagaacatcacaaaattagagaaagcccagttagagggaccatctggatgtgtagaaaaagcagccacaaaaatatgttaatggcaataaaaatcctgccacayaaatttgcatttaattgaaaaatcaaccttataaaatgtgaaaacctttgttgaattataaaattatttatattccaagtttcttgaaaactgatcaaacacctccagcatttcggtgttgaagaaatgaatctaagttctttggaatcttatctcaagaaacaaaggaactgcagccatgcaaaatgttttaacttttcaatctatatttttaccttttgggaaaaagagcagcaagaagttaaaaagagctgaccccaaaaatgtacaggtagataagcctccaagtagcagccaaagaaatattcagcatttcaaaagcttcttgaatttacagtggtaagaaaatattttgggatttcttgatatccacaaggcaaagaatttgtattgaaaactttactttgttagggtaatgttttgagcctttacataatgctactttaactgaaaatctttgatgatacagtttctaaaagtgtaattattattgatttgtacatctctttttttamgtaggagacacagcggttcgagaagtttttgaagagactggtataaaatcagaattcaggtccgtcctgagtattcrgcaacagcacacaaatcctggagcttttgggaagtcagatatgtatatcatctgccgcctaaagccatattcattcaccataaatttttgccaggaagaatgcttaagatgtgagtggatggatctcaatgacctggcgaagactgaaaatacaactcccatcaccagcagagttgctaggctgctgctgtatgggtacagagaagggtttgacaaaattgacctgactgtggaagaacttccagcagtttacacaggactgttttataaactctatcataaggaactgccagagaattataaaactatgaaaggaattgattaaattcacatttatatgtttagaaacatgtagactaacgaatgacataagaaatagtggacattttggattgattaaacatctgactgtgattttctaatgtatatgatttccatgaagaaattttgtttctaaacatgcacattttaaaagcctcttttcgaataaagcaaatgcgtgaaaaagatcattgctctaggtaagcttcactgggtaacagcagatgcaatataaaagggagaatatacattttacaacttttgttatttttctttactgggacaatggttacatattttactactggataaaaaattgtttgaccaattayccaaactgagctatacacatttattttcttttactctcattaacaaatttctaaaatatacttcttctttcatgtgaaatgagattagatgtggccattaaaatcagctcttagcagacattggaagaaaaagtatagctttctgcccaggtcctgttttggatccaagtttatactgcccagttcgtttcagtgccacataccaactggtgtatttccttgaccggtaagtattgtagttattagattccaatcgttcaaaaaagaaacactcatccgtaacacatttctgaaaaataaaggaagaattacctgttattattatcattattattattacacttttcatattaaatatttatgatagtataatgcctattctgctcaaccagcagcagtgatgttgggttcagcagggcaatcaaactaacaagattcaatgggccaaaatgtgacacagactagttctgaagaaggatgcaggccaggaacacagcatgtcagcaggacagcatcaagtatgtctcttcagtaggagttcagagacaattctccagctccaaaacagacaggtcaggtgttaaacacaaggagggacatacccagtaagaagaaatatgctatgggaagcccaaagctatagctyccagcagtatttatgatccatccacactcttcccagtcccaaggtaggttaccaatcagggatcatttttacttttatcagaagcagcagtagaaggctaacccattgtaatctttccatacagaaggaggtttgttaatactttactcacaagaagagttaattccccaaattttaacaaaaagttttaagtggctaatgttttttaaggsataataatgaatagtttattgtacagaaaatagctattggtatataatgccaaaaataatattggaacattatattacatatgattaacaatctccaaacactgttagacaatgaggaataagtaagtatcatactgatttctggcagtctctttcaggagggagggactttgccttttaatttcaattcaactatttatcaaaaaaaaaaaaaaaaggatagctggctttcaaaaagacctggaaataatactccaagtaatggaatttaatagctaccacattatttaagataaatgttcggccgggcgcggtggctcacgcctgtaatcctagcactttgggaggccgagacgggcggatcacgaggtcaggagatcgagaccatcttggctaacacggtgaaaccccgtttctactaaaaatacaaaaaattagccgggcgtgttggcgggcgcctgtagtcccagctacttgggaggctgaggcaggagaatggcatgaacctgggaggcggagcttgcagtgagccgagatcgcgccactgcactccaacctgggagacacagcgagactccgtctcaaaaawacaaaacaaaacaaaaaaaaaaaaaaaaaaagataaattgttcaaaaagcaacttcacagggtagcactgaagatacttactgacctcaaaggggaaaaattaatttattcacttcaaaaggaaaaatcatttttacattataattatgtgtatatatatcaatcgaatgataaacttatatagaaaacacatgtaaattttatctaaacacataaatataagatgtatacagagacataaatatatggttttgtattaataccacattccagtttatttctatatactcatatctaggaaacttcaggtttggaaaagcccacattaaaaagacttgaaccttttcccagattccttggttctaagataaggcaaacaatggcacaaactgtgacaaaaacataaattaattggcaaaacaaggaaaagagctggcataataacaaaaatgtaaagtaaagcctgggaaagaactaaaagtgactaatgtgtctcagccatctaaagtaagggtgtggtattagatcctgtaatcttctagagataagaattttactggatatttacttggttttaatattttgaccactgttaaatggatttttaaaaactgaaatacaaacttaactaatttgcctattatgtaatacgttactcataaagaaactcaattcttcatgatgcaaataaatcacagccttacagagaagcacacattgacaggacccagctatatgaaacacaggactgtcttgtgctgttcataaagattcaaatgtgataagagtgaaacacctaaacttagagtaatatagaccaatatattccaaatccaatacttttactctacctctagtgaaatttagtacccctctcgtgtgaactgaagttaacctgttactttattctgtcatcttcattgccactgataaaagaaaaaaaaatcttcccttttctctattccaggtttatgatcaagaatagaagcagaagggaaacaaagagtgaaaggaaaattcatagtaaccataaagacaacatgaaaggtcaccatggaacttcatagactgattccccagaggtaaatttaaacaacagcatttagtcatatgttcatttgttggtgttctatcagcttcccggatgccccaccttgctagctggcactccctacaatgcttggcatactagaatactaactattccwataacatttgccttttcagccagttcctaatatttcagagaaaagaaacagtaccagggactaagtggatacatgatagaacccacagcttattaattaattaatttacttatttatttattacaaaagttatttctacttttgaaaaaaaacagtggagggaaggaaacttacatctgtgctgaatgttcagcaatgcaaatttactaaacaactgttttgctcttgaaaacaaactgcatttttttaaaaaaatgagtagtagsgccaaaatttagtggtcaagaaaagtagatgtctaacagagcaacatatgtacaattttcaattgtctccattctgagtttccaagtcatcttcagtgactgtgatctcagtgtgcctattaaaaactggtgcattataattttattaatctttataaacatatttaaagaactgttttcctattatcagtgtttgctcaccatttcaaacttcggataaaaaggggtcttcagaggaatgccaccacaaagaaagtggcttctaagggcttataacaacttgtaccttgtttccaaagccttattttatataggcctaagagctgagaaatcccttaatgcatgattattgactgcttttatgcatatactttaaaagtcacaacaatattttaacattattatactcattaacaaatgaggaatttaaaactcagtgcttttggtaacatttcagattttggataccttttgcccttacatctacttgatacctttatatcaaattaagtttttgtttatgtgttgcttttttaaaattgaagaataatttagaggtacaggaagcatagagtttaaataatacacttactcattcaatctatatatttttttcttctaggcatctaagacacatcaatgaacaaaactgaacaagatccctgcctttatgccactcaaattctagctgggggagacacacaataagcaataagcttaagtgaataaattatattctatgttagaatataagaaaacttagaaaaatgtaaacctgaacagggtaagagggactaggaatggtgagtggtagaagctaggtgcaatattaaatagcatggtcacagtaggctccattgagaaagtgacatttgagcaaatgcttgaaggagatgaaggcgttaaccatccagctatcagagaagagcattcccatcagaggaaaagccagtgcaaaagccttacaacaggatcatatccagagtatttgaggggtagcaagtaggccaatgtgggaagagtagcaggaaatgagatcagagaggtaatgggatgggagagggggcagacctcatagttttgtaggctattgtaaatatttggctcttattctaagaaaatggagagccactggagtcttttcagcagaaaaataacatgatctgacatctttttgtaggattattctcgctgccaagactacagagggccaaaagcagacttagaccagttaaagggttattcagtaatacaggcagagagaatgaaggttcagatcatggaggtagcagtagaaatggtaaggaggtgtctgcttttgtacatattttgaaggtagacttaatagggtttcctgatggattggttgcatggtatgagaaaaacaggggaattaagaatggcactgaagtttctgttctagaatgataaacttgccatcaaatgcggtggggagggctatgagtaggaacagattttataggaaaaggttaataattcagttttgtatgtgttgagtttgagaggaatatcagacatccaaatggagacagtatttactgagcacctactatgcaacagacacatcatttaacttttttccttcttttttgctaatgctaataaccacagaactagaaattaaaaagtactaatttatttggaataccaggaagtgtgttatatacaataatgccagtaaacaagtattctcaggtctaaaaggtataaacctaaaaaagaaatgtagatgtatacatatgatagtgatataaatttgtcatgtgttagtgatggggcaacacctcaaggttcccctggaggctgtccacataaaccagcttagtttatggttctataagaggggcccaataaccatttattgatattgataatgatgctaataatgttaaagatagtgctggcagtttgaccccttgtagggagtatttgaatagagcagactctaatgtagcatgaaaaagcataatcaacacttttaaaagtttgttttttgtctggatagttaatttactttggaatttcaaaaagaaaataaggttatgtgagatatttctacataatgaaaaactgatcccaggagatggcgggagccatgtttctcactgttgggggtggcaggttacacacaagcaagtgggggggactgctaaaatattcatttgttattgatggattaaggttggagatatcagtatgaatgaactcatatttagatgtttttgttttgttttgttttgttttgagacagagtctccctctgtcacccaggctggagtgcagtggcacgatctaggctcactgcaacctctgcctcccaggttgaagtgattctcctgcctcagcctcctgagtagctgggattacaggtgcgcaccaccacacctggctaatttttgtatttttagtaaagacagggtttcaccatgttggtcaggctggtctcgaactcctgacgtcgtggtccacccgcctcagcctcccaaagtgctgggattacagatgtgagccaccatgctctgcctcatattaatattgatacagatggccaaatatagaaatatttataaatacatgtatatacccaggctagtatgtaccaccatttcttgctctgtcagcttaagcttagagggcttagaagcaaagatacttcagtagcaacaagcacacccagcattccagtttgtggtttctaataccattctctaataaaagaaaccaatgctctttggagaaatggctcattctagggtggagtagggaatatacaaaatgagcctggagcatcttgtaggccaaaaagtaatgaagtacttaaaataaatgcattgttgagagtatgtcaaagaggagggcacaggagccaactgaaagagctcccaatggccaaagctggaactatttgagcaacaaaataaataatgtagtattggattgtaactcaaagtataaaataaatatctgtgaatacatattgatataaatgattgaataaataaataaatggaggaaaatgaacacatttcccaggcaaaagaatgacgatttatgtagatactacccctcaaggaggtggagcataaccatcatctccatctcttaagtgtggactatgcatggtgacttccttccaaacagtatagtatggaaaggaagtgaaagagtaactttacagtggacacaaatactacctcagccaggtaagcaaggattatatcatgagttatcagtcatgaagataacatataccattatatgccacaaaaatggtactttacttctatagtcttcctctcaaacactcaaatccctatctggccatgaaaaaaacatcaggccaggtgcaatggctcacacttgtcatcccagcactttgggaggccaaggcaggaggattcttgagcccaggagttcgagaccaatttgggcaatatagtgagacctcatctctactaaaaataaaaacaaattagtagagtatggtggcatgcatctgtagtcccacctacttgggaggccaaggtaggaggatcgcttgagcccaagaattcaagattgtggtgatctatgatcacaccactgccctccagcctgggagacagagcaagaacctgtctcaaaaaaaaaaaaaaaaaaaaaaaggaaaaaaaaaatcaagcaagttgaaggacattctaaaaaatacctcaacagtactcctcaaactatcaaagtaatcaaaaataaggaaagtctaagaaactgtcacagtctggaggaaactaaggagacatgatgactaaatatggtatcctggaacagaaaaagaatattaggaaaaactaaggaaacatgaataaagtatggactttagctaataataacatatcagtatgggttcattagttgcgacaggtgcaccaaactaatgtaggatgttaataaaagtgaaactcagtgtggagtatatagatactctctgtgtcatctttataacttttctgtaagtctaataccattgtaaaactaaaatatattttttacaaaactgactctagggctacaagtaccatcacaaaaaaggatttctcaagtcactagatacagcaactctagctataatgtgaaaaataaaagcacctcatgcattcctgtgctctactatgcccaaatacagatgattcatatatacatatcactttatttcaccagactgtcaacagcatgtttgtgaagatattcatctattctgtctactgctgtatcagtgcttggcacatagtaagtcatcaataagtatttgctaaattaatgaacaaatggaactttttcagatagcttacaataaaaatataattcaatgacatttacaaaatctaaataagaactagagaactaggactggggaaaatccagactaggaactgaaatacagaatatggtttaactttatgaactatttactccctaaggaaaatagaccagatgacctttccaagagttgactatccaaacttgacatctgtgaggatctctgaagggccaagaaacctagcttctaatatcgccttgatccctaactaacttgtattttcaatcaagtcctttaacttctctaggcatcactttcctcctctgtaaaataagaagattggattagatggtctttagaatccctcctaatctctagtagccttagtacacaataaggaaagaaataagcacatgagccaagttctcctcacatccccccagcacctcctctcaccccaactctcccttccttatgcatcggcctcacaatactagtccactcctaattttagatttgaaccttatgaccatttccccatgctctgtttactgggttgtttattcttttacagtacattgatttttcagttttggcttttgagggagcttgctcaataggaatccaaaagtgcttttgcttataccacttctgagaattaaaaacagacatgatgtaagtatcaatgttgactatttcagaaaaaaaagaaacatccaaatagtgaaaagttaaaattaaatttgatctttttattttttatttttttgagatggaatctcactgtgtcgcctaggctggagtgcagtggcgtgatcttgattcactgcaatgtccacctcccgggtccaagcaattctcctgcctcagcctcccaagttggctgtgattacaggtgtgcatcaccatgcccggctaatttttgtatttttagtagagatggggtttcgccatgttggccaggcttgtctcaaactcctgacctcaagtgatccacctgccttggcctcccaaagtgctgggattacaggcatgagccattgtgccaggcctaaatttgatcttaaacctgtaatacctataggttgcataacagttttaagattgagttataaaagaacagtaattctcattatgcaataacctttgtattttttctagtattttatctcttaaaaaggatatatattcctcttcaattactgtatttttctcacaaatttcatcagtatagattgtcagtctggataattgggctctcagatatctattttctctactttactttattatagatttcatgtcattgtgaaggcccctcaattaagaaagttattctgtaggtaaaatgtattttacttttacagaaattacatgtatatcctcagagaatatacattttttcatatttcactattgtggatcaatgcaaattacattctaatactgagatattaatattttgttcagggtatatcatgatctatatagcattatatagaaaacaatgtgcaactttctggcagatgaagatcagtaaagttttttcataccaatgctaacattgaggtcatttggtgatttaaacttaaaactacaattaacttcactttatgcaattttcttaaaaatctgtaattttgtgaacacttaaatcatcaattctaatatttgttctggacttctgttgctcatagcaacaaaatttatcctgctatggaatggagtaagaagtctgttgtgcattaaagaactatttaacttcagcttccaaatacaggctttggcaattaaatatagttattttttgaattttcctatttcctagcttcaaaaggaaaggaaagacccttaagaaatgttttcaaacaacacaaaatcggtaacctgaaaacatgcataccattaatatgtgaaggtgttggggaaaaaacggtatacaaattagtcttttttcatactctaattggtaatcaacctaacataactcttaaaaaccaaaatgttttttgtatccacagcactcttctttctgggaggaaactagactgctttagaaatcactgcaggaatcacagagtaaaatggagaagaacccagggatgtgtcataacacagtagtctgaaaaagggccaggtagaagagtgggaaggactatgcctctggcaagtgcaagttcataaattccagtttcttcaagttacgaggcacatctgcatccccagatgatggctactggtcagaacactgaactcataccaaaagctgctgttgttgacagtttaatgtctatggatctgactcggagagaaatgtgccacttactgaatcaccaacaccatatctttggtgttgaggtggggcacgcttactttttcatctgaagattgacacagcccaccaagaacatttgaaagagacaggattgctgctgaaaaggcatgacatcaagccacacaaattggatggtaagactagagattaacttgtgaacaggtcgtatgacgagagctgaaacgtacaactggatcttggtcatgccattcctcaaaggagactaagaaatc

SEQ ID NO: 95750 - DNA, 49423 bp, Homo sapiens
  misc_feature (1)...(49423): n = A,T,C or G
agtgattttggaatctggcagtggacagaaactggaatgacattgaagatagggttagtgaaagcatgaggtaccttgaaaaggcttttagtagaggtataggcttgaagagactcactttaaaagagtgaggacgatattattggaaactggagaaatagatccttcttatgccatggcagaaagattagcaacacagtagccagcagtaatgtggaaagtagatgtgtccacctaagagaatttgttatctaactaaggagattgccagctagtgttcagggtgacttctagcatgtgagcagagcaagatatgctaaagggaggactgttggccaggcgcggtggctcatgcctataattccagcactttgggaggccaaggtggtggatcacttggggtcaggagtttgagaccagcctggccaacatggtgaagccctgtctctactaaaagtacaaaaattagctgggagtggtggcccacacctgtaatcctagctatctgggaggctgaggcagaagaatcacttgaacccgggaggcagaggttgcagtgatccgagactgcactaccgcactccagcctggtgacagcgcgagactccgtctcaaaaaaaaaaaaaaaaaaaaaaaaaaagtatggctttcaggcagaaatcaagtccaggcaaccccaggaaaacatggtctaaataggaaacccaagttgtaattataaaatcccttaagacctcagaaagatctattgtggtgtcttagagtacctttcaatcagacaaaatgtcctctaaatattttaacagtatgactgacaaaccctctcaaacaatagagcgtatcttgaagagatgtgtggaagtggcttttgtctaatggcatgaacttcagtaagattaacaaggaaccaacacagtctttaacagcagaaacactgccagcatgaactgaaagggatactatctttcatgaaaaaggaaggatgactcgcaaatcagaactgcccacaaggtgacatcaagagccatagggaattattttcagtctttgaatccggatcaaggaacttcaacatttgcctggctggattttggaattgctacagactcgttgttgcctctcatttttccctttttgaacaggaatgtttacagtggttattttacacctgtccaccactgtatttttgtgtcggggaggagtgggaggcagataacttgcatttagttcacaggtcttcacactaagaggaactgtacttgaagaactttaaggaactgcatcctaggaatctcacccacacctggatgtaatttatatgctaacattctggatttcaagctgcttttctaaagggatgagatttttggggttcttgggagaaagggaatgtgttttgcatggaagaaatagaaataatttgtggtcagaaagtatactcctcccttcaaaaggtggaagctaattcccctccccttgaatgtgggaaaaataaaagcaagggaaaaataacagcaggtacacatgttaggattccattttggggatatttagcacacagtgcacccaggtggagaaacttgattcagattctgattagactagtaggttgatggtctttaattaaaggtctgattttaccctatagaaagtaaaaatccagtgatgcattttaagcaatggtgttacatgtttagaaaggtcctcagggaaaccagataccatacaaatgaattcagtggaaacacatttgctgtaaatccatagtggtccactttttcatatttcagtcatctggggaaactttgtttcagctccatgttgtttcaattccatgcgttagctttaattagctgtggtatcgtgagcaaaccatttagttcttcggggccctggagcctcaacatagtcctctaaaatggggacaataaaacctacctcttaagttgtttggggataaaataagaggatgataataatatgtctggcaccttgttgttggtgaataagttgtagtgattattacttagactaatggagctcaacaaggtgatatttggcaatatctggagacatttatgttttttaccactgaggctcaggggttgggggtggtgctactgacgaccagtgagtagagcccagttgctactaaacatcacgtaatgcacaggacagctccccagaacaaaaaaccatctagccaaaaatgtcactagtgctgaggttgagaaaccctgatttaaaatataacccaagctgggtgtattggtataggcctgtagtactaactattcaggaggctgagacatgattgcttgagcccaagcccaagtccaccctgagtaacatagtgagaccccatttctaaaaaataaaatctaacccaaccatgagtatgttaatattgttcccgtgttatagcacccttttaaataatgagtcagagttaataacggggtgcaataaaaaagagatctgatagtttcacaagatctcagggcttggtgaatgtaactccaaatcttcctgaaaccaccctccatcaccctaattcctaaatgcccacagtcattcccaccgataatttatctcttcctagtcttctagccttcaatttccttgcatctgagatccactcttaaactcttcggtgacttacttctaaggaatataatgtggtagcagtgatgcatgtcacttacaagattacgctatataaaggcattgtggcttcctctttgctgtctttctcagatcatttggttgggagaagccagctgctatattgtgggtatggcaagtaactcaggctttcagccagttgccagcaagaaactgagatctgttgccaacagccatgcaagttaacttagaagtagatcctccggggctgggtgcggtggctcacgcctgcaatcccagcactttgggaggccgagacgggcagatcatgagatcaggagatcgagaccatcctggctaacacggtgaaaccccatctctactaaaaatacaaaaaattagccgggcgtggtggcgggcgcctgtagtcccagctacgccggaggctgaggcaggagaatggcgtgaacccgggaggcggagcttgcagtgagccgagatggctccactgcgccccagcctgggcgatagagcgagactccgtctcaaaaaaaacaaaacaaaacaaaaaaaagaagatcctccagcactagccaagcctaaagaaaaaaaccttcagacaactgcaacttcatgagataatctaatccagaatcacccagctaagactcctaaattcctgaaccacaagaactgtgagatatttatcttattatttatctgttgttgttttaagctcctaaatcttggagtaatttgtgacacagcaatagatagctagtatgcaatgtgaagttgtaattaagtatatagtaattgcaacaacataaattgatgattgaatcttggaaacattatgccgtgcttccattgacagtaaaaagtggcagtaaagatggatattgcaaattatatttgtcttaattataagaataggggagaatagtgtgccactgaagttttcttttatggaagaattttaaacatgcaccatgtaggggtggaaagatgtgatacctttcctcatccatcatgagtcatggctgacactcttataacaaaagaacagattaacacaaggaaagcataacagatttatttaatcagttttacatgacatgggagccttcagaatgaaggctcaaagacccaggaaaagctgcctattttgatgtttaggtttgatgcagagcagacagccaggcagaaatgcgattgggcaaaaaggatatgatcaacctaatggtaatagagaggagaaacctggcaagatgtgtctgttcaaattcttcttggcctctctgtgtggtattccttcctccaggatacggtgcagggccactctggaacaaaagtcttgagagccactatcagacaaggtaggtcagagaacctctttatggctggctcctacagaaagacacggcaagattagagtaatatttctagattttatgactggctttgggggcataggggctctagtttcttctttttttttttttctttctgagacagagtcttactctgtggcacaggctggagtgcagtggtgcaatctcggctcactgcaacctctgcctcccaggttcaagtgattcttgtgcctcagccacccaagtagctgggattacgggcgtgtgccagcacatccagctaatttttgtatttttagtagagatgaggtttcaccatgttggccaggctggtctcgaactcctggccttaagtgatccacctgccttggcctcccaaagtgctgggattacaggcgtgagccaccatgcccaacagtggctctagtttctgtgacccattttgaaaaagaggaattctagtttctatggcttgctctggggaagaaaggggagcaggagaaagaaaggcaggagaaggtcagaaagatcttctgactctcttttcttcagttccaagtattcaacatgccaaagtgccacactttggggtctcattttctgaggcccaataatcattacatttcttttctttctttttttttttttttaagatggagtcttgttcttgttgcccaggctggagtgcagaggtgtgatctcagctcactaaaacttccaccttccggtttcaagcgattctcctgcctcaggctcctgagtagctgggattacaggcgcccgccaccacgcccractaatttttgtatttttaatagagacggggtttcactttggtggccaggctggtctcgaactcctgaacttgtgatccgccctccttcgccttccaaagtgctgggatttcaggcgtgagccgccgcacctggcctaatcattacatttctttgaagtctttccttaaagctcttccaccctcattttcagaatacttatatagcagatctgtggttttggtctgcctagcgttttctccttctggtaagagaacacctcttctccctttggcatctccagtccgtgttcgtcatgtgacttcactggctcttccttagggatgggttatgaaatcaaacttgtcagttgggatcctttatatcgggacccacacagatgagccaagatgttctctctcaggattccttgggcatgctctgccccagggagttctgataggaaggctttattgaccacagctgaagtgctgttacagaaaagcctagacttaggagcaaataaactcagctctcatctcggttatctggtggttgggctgagaggagaaaggtgctcctcaagcttggcttctccagcttcaccgaagccagggatccacaggagagcgcccgtgttgacagcgtgagcggcgacccggtgtcggcctggcgtcccgagcctgtgcactgggccgttttctttttcttttctttttttttttttttttttttgagacggagtcttgctctgttacccaggctggagtgcagtggtgcgatctcggctcactgcaacctccgcctcccgggttcaagagattctcctgcctcagcctcccgagtagctgggactacaggcacccgccatcatgctcggctaatttttgtatttttgtagagtcggggtttcaccaatttggccaggctggtcttgaactcctgacctcaggtgatccgcccgcctcggcctcccaaagtgctggggctacaggcgtgagccaccacgtayggccagcaccgggcatttttcttactttagccatcccgtgtttgaggttgctgtctgggctctgctcctacccgagggcacccctggaggaaattctcgaggtgacctggacagggcgggctgggcgaggacgctcccggggcctggaggcggagtcgggggygggcgcgcgcagtcatctgactcggtgactcacccgcggccgcgcttcctctgatccgggccgggcgggaagtcgggtcccgaggctccggctcggcagaccgggcggaaagcagccgagcggccatggagctgtgcgggctggggctgccccggccgcccatgctgctggcgctgctgttggcgacactgctggcggcgatgttggcgctgctgactcaggtggcgctggtggtgcaggtggcggaggcggctcgggccccgagcgtctcggccaagccggggccggcgctgtggcccctgccgctctyggtgaagatgaccccgaacctgctgcatctcgccccggagaacttctacatcagccacagccccaattccacggcgggcccctcctgcaccctgctggaggaagcgtttcgacggtgagcgctcccggcccggccgggagttgtcctgggggaggggagaggcggaccaccccggagcgctgtgcagaccctcaccaccccactgcgcagacgagaaaccgcctgggagctggcaggcgatctgcccagcgccacatggactgaacccacgctcttgcccccaccctcctactgcttcttaagggacaccttgggtgctcaggaaccctggtttgagagccggatagtaagtggaagagggagtttgctctgaggccttgttgggcaaatgrcatggacggaggggacaccggagctggggaggaaagtgacagctccttatttgaaggacgtgcaaagggataagttacccgaagggcttagacaagctctcttgagggaccaggaatcccccaaagctgactgtcatttataggccagtttcgccccctcacctctcctcacatctcctggtaacagctcaaatggcagaagtcctcagtttcgagcactgcctaaaactgccctctctcctaaaatctcttccatataaaatgtgacatgtttgcatctgactacgtttctgcggtcagtggttaggcagtatccaactttgtttctcaacaccgatcatgttgcctgctctccctgcttcctcttttacagacccctagatagcgcctctgtctctctcaccctttggctgcagacagggtgagttttgtcatgggagtcagccaatcacaccatagacaaggcaggttcccctggggagatgtttgaagacgccacacactgtcccctcagtgtgagacctgtgtaggtgggactgtcctgaaggcgtatcgtgccctgcagaattgtaatttggtgctaactgtactgcctcctggcattccccaagcctgtcgctgtacccagtggatactatagagcttaagtgtgcttgcaggacmctgaacaggtggggagggaatgtmaaactaactgaataatgtgttctgaccccagataggacaggtgcctaggctcaagctgcagaggcccaagatgctgatggcagaaatggttcattctctacaatcagaaggctcatggtttccttctgttttgtacaactaaatgggtattatcagtctctattttagacacacacactaatgagcctttggtatccaatctgctaaggccagagtggggttaagatgtagaaccaaagtgtttggttgcattgggatattcagaaagattgcatggaaagtacatgaaggttgtctcagaagatcatgactagggttggaaatctttttaaaaacaaacacsctyattatgtttgccttggagttcagcttgtagaattggattttccttctgtgtcatactgctaagtaaaacaaggacttggtaatatgctgaactractgtgacaagaaagcatgggtgatgtaagttaacaataggtagataaccaggacttaaatcagctgagatggttcgaaggcaaggcttggtatttcaaggcatgtgcgggtgattacctgaagagtttgcctaactcatggcctctgagtgaagcagccattaattatgcctggyattattaggaagcaggtcataaaatgtgttggcccttatggctaagacttgaaggcatgcatgtgagcattctaggaactcagraggagcagcaggtatctcagagtaaaagcacagtggagttggaaagatttggaaatatgggagtgttcacaaagtgcgacgtggtcaggaacacacagtctaggccccagattgttcagcatcacatagcccctgtctctgaagagcccaggttgtatcacaaaccttgctttgaaacagtatgctttttgcaggcagagagtttggctgttagatgcatagctgcttctttagcttctagaacagcgttcatcacatgctagtcactcatttttaaaaataaacaaatagcttcactccttcatttcctggaaggctaaactaacccacatacctttgacatactgcctcacagccctttgagttttctgttagaattttactacctagggtcaaggttctaagccagcttccaactctgatctcaaagctgccagcagctttaatttcttttttaaaaaaattttaattaaggaaaaaatacacataacataaaatttaccatcttaaccttttgtaagtatgtatttcggtggtcttaatttcctttttaatctgtcagggttttcctatgagaagggccctcaacacctacatccattccattctctcattggttaacttccatacacttccaaacatgtcagaattttccgacctcttctgcaaaaaagcataagackttcttacacataagtagcatatataaccttctggcttaccaaaatctgtaaaatattatttaaacagttgccctgaagcctatctgatcttttttatttagtgcctttacatttttatttaatattctgatttttggataccaaaaacaattgctctgaagcctgtctgatcttttttatttaatgcctttacataatttttatttaatgcctttacagaatttttatgtatttaacatttaatgcctttacaatatttaatgcctttacagaatttttatttaatattctctgatttttggataccaacaaaaggtactttttttgtatttaatattaatattaatatttaatgcctttacaatatttaatgcctttacagaatttttatttaatattctctgatttttggataccaacaaaaggtacttttttttttttttgagatggagtctcrttctgtcacccaggctggagtgcagtggtgcgatcttggctcactgctgcaacctccrcctcccgggtccaagcarttctcctgcctcagcctcctgagtagctgggattacaggcgcctgccaccatacccagctgattgtttgtatttttagtagagactgtgtatttttagtttcactatgtgggccgggctggtcttgaactcctgacctcgtgatcctcccgccttggcctcccaaagtgctgggattacaggcatgagccactgcrgctggccaacaaaaagtaaattttaaaggctctggtgagaattctggaccttcttttggggctttatatgtaagctaggatacttttgcaggaaggtaacaggaactctgactcaatctggctcaaacaataggaaaacttatttcacayattaggatgtccaaaagtagggatgaatttagggcaagttgaccaagtggctcaacagtgttaccagggatccatattctttccatctctgctctgtccactttagtgtagtggcaactagtccagctctcacatacagagaaacgaagttttcttgtgatttgctcagaactccccctaacccccacatcctatcactggtcagaattggtttttcattcccaagagtgatggattaccatgatggtttcattattggttcttaacggggcttcatatgtcacttcagagtgtggggaagcrtttaaaattcccatgcctgaatcccattctaatagattctgattctgaaggcatggacgttgggattttcaaaaaacttcccaagtgattctaatgtacagcttggggtgagaatctctagttggacttacaatgggcagcatggatttgaggagttaactacaatgttactagcacatctgttttaaaaatttggctaaaatccttytaaaatgtgtttacatttatttctcaaacagatatcatggctatatttttggtttctacaagtggcatcatgaacctgctgaattccaggctaraacccaggttcagcaacttcttgtctcaatcacccttcagtcagagtgtgatgctttccccaacatatcttcagatgagtcttgtaagtacctatgcaatgtgagtgtattatatcccaggtgctcgctgacggacttaagtgccaaaaactgactccatgctaggaaccactgagttctcaaccagtgagtttatgattcctattttaaaaataacctttaaagtctgattataaaagtagtacatagtctttgtggaaaatttattaagtacagtaagtgcagaagaagaaataaatcactcataatcccagcagayagaattaatcactgtcattttaggtgtatttttttgcagagtaaaacatgtaaacattttacatagacataaatacaaacatgataagcattgacatgaaaatggcagtaattctgtacatgtgcttcttgtatttttgttgtatttttatatcatgcttttttgcaaaatacattataaattaaacatgaatttcactagttttctgtgatatcattttcaatggctgaataatgttctgtcactatatggatgagctgacttgggtaatctcttttggacatctaggtaatttcttaacttttgtctttgaaaacatctgtatccatgatctctatttataatctaattttacagaaagataatgcagagctrggggagagggtgggtacagcagtttcatttgtaatctgctgtacaatataatcaacatttagctgtatgattttgtcctcgttgttgcctaaaacgttattctctagggcttttcccaaattgttttagaacaaataagtgggcgtgccatttctatagggtatactgcctgagaataatgtggaattgcaccaaggaatcaaagaagggcagtataaggacatgtgtaatataagattcgtgcaagaaagagcagacaggggaactaagtgtaaagayagaggctggaygctgtrgctcatacctgtaatcccagcactttgggaggctgaggtgggtggatcacttaaggccaggagttcaagaccagcctggccaatatgctgaaactgcatccctactaaaaaatacaaaaagttagccaagcgtgttggtgcgtacctgtaatcccagctactcgggaggctgaggcaggagaatcacttgaacccaggaggcagaggttgcagtgagctgcaatcatgccgctgcactccagcctgggggacagagtgagacagtctcaaaaaaaaaaaaaaaaaaaaaaaagataggatgccacaaatttagagaaaagagcaactccattacccccagactgcctcacagttaagtacatgtcttcatcctgctggtttagatgagatttctcaataatacatctctttgaaaraaagctttctttctcttcaattccatagctgttcttagaagagaaataggaaaattcaccaacatcaggtatcatttcaattgatactcagcactcagacaccatgtgaagtaggttttgcaacctgaattgagatggaaatggtcattacgttgccaaggaatctttgctgtccatyggcaatacagataacagattgtaaattccacaaaatgaaatgtatcgagactagagagtcatagcttatctttcagtcagttctacaaaccctctttattctgaaagggaagtttcttgagacaaggttattgtgaaattttcagctgaagaataaactagtttttagtctttaaactagttgatgatgatgataaaagtaacacatatgaatggaaataayaagatatcaaatgtccagagtgggaggacatgttggaggaggtgacacatgttaaagcaccactatttattaaaaataaaaatatgyatgccctgagaagtggactagtttttactgcagataaatggacacataaatcaaggatgtttgatgcagtttgcctgtaatgtgaagaactgtcaataaaactcaatgtccatcaatagaggaatggctaaatacatcttgtcaatctatactaaacagtataatcacaacagttaagaataaagaagcagtattactgagaacacacatggagaactgacaagataaactgctgagttgaacaaaggaagctgtataattatgtgtagaggtggaccctgtttatatatcaacacacgtgcaggaacacacgcataaagcaatactatattttctccttccgtgtacatctatgtcaagcctaagaaaatgcccgataagtatttcctctgaggaaggtagagggagttrggtgagtatctcaaaggagattttagccttatctatattatattgcttttaaacagaatatatagatatgtcatttgtatattcaccctccaaaacaaatgtatttatggtgcaaaaagatacagaatgggctaactgaaaagtcaatgatataattcctttcacacttcagggaagtgatcattgttaacactaataacttggttgtgaagtaaaaatggaaattctrtagctatgtgtccatatatttagaaaaccaaatttctaattgttatatgtattttccactgagttgaattacagtcctgtttaatatcagccagttgtcaactattagaaaataattggtatcaaatatatgcaatatattaatgttttttaggtgactgtgctatttctggaagatctcaaaactagaatgtggcaaaaaaatgtttttaaacagtgaccaatggagcagtgagctctaggtagctgattaagaatttgatacaggctgggtacagtagctgacacctgtaatcccaacactttgggaggctgaggccggtagatggcttgagcccaggagttcaagaccagcctgggcaacatggcaaaaccctgtctctacaaaaaaaaaaaaaaaaaagaaagagaaaaattagccaggcgtggtggcacatgcctacagtcccagctacttgggaggtcgaggctgcaatgaaccgtgattgtgccactccactccagcctgggcagcacagtgagactctgtctcaacaacaacacaagaatttgctatagatgtagaggaaacataattagactatgctcataaatagcaatatagttcttagcctggcattggctaactcatctaatggagtgtggttatctaatggaaaaggctatcttgtcagaagactatcacctgagatgctcacactactgatagagcacttttgcctacctgcagctaactattctgtgagcatctgaatggtggtggtggtagaaggtgataaaccaccccagaggacacagtattaaatcattaatctccagcccatcagtgtctttgccgtggcaaagtccaaagctgttacaccctttagctttcaatctctttaccatctgtgggtttactatgtggttgattccactccagacctctctaaaagactaaatgactattgggccaaccttagagtgtgcttcaaagattgaaagattagcctctcaccagaagcagctaactggagtcccattctggatgatgtgaacttttaattgagtgggacaaagctgaattatttttattgagtgagacaaagctgaactaagctaaagggatttggagagtaagtcttaaggcagatttggatgatactgagggaaggtgggtacagggcaagtagaaaattctgaatgcaaaagagtggagatactctctggccttaaagggagtagatttgagcgacacctagggcgttaccaaggattagtaggaactgaggaatgtttgcactttcaactaaactcttagcttaactaggaccctactctgttgaggagaagttggagagactaactcttttrggaaaatgaggaaacatggagttgacacccaaattcccgttctgagtgactcaagtgactggatggtggtgctgtgactcactgaaatgaggaacacagaagaccagcaggttgaagtgtgcggaggagggagggaagagttctgttggggcatgtggagtcgaaggaanctgcaggacatccaaatggagatgtacaggaggcagttagagaaataggtcatgtgcttgggagaaaataatagtccagaaatatcaatgacatgtttaggaaacttattgtgtgtcattgagggattaacaaaagtgtgtgtgtgattttaaatcctcaatacagatactttacttgtgaaagaaccagtggctgtccttaaggccaacagagtttggggagcattacgaggtaagttccatgcagtttcattgttaytttccagtaaaggaaaattttcagttggtgctttgtgaaattaagcacagcaaaactttgccgccttagatcctttacagaatgctttgttatgtagttccaaaatgatttccattgaacatgtactacataaagcatgggagaggtcagcacagtggctcacgcctgtaatcccagcacttcgagaggctgaggtaggtgatgattgcctgagctcagaagtctgagaccagcctgggcaacatggtgcaactccatctctacaaaaagtacacaaattagccaggcatagtggtgtggacctatagtcccagctactctggaggctgaggtgggasgattgcttgagtccaggacgttgaggctgcagcgarcctagatcacaccactgcattccaggctgggcaacagagcaagacccctgtctcaaaaaaatacaaataaataaatacagcrtgggagaaaactcatttgacctctcaaaaaatgtttgaaggttattacattcctgcagtgctgtaattcattgatgctcttgggactgtaatgtttatagcactacacatggccccaacctgtcctgattagggaattttgtttcagctatcacttctgttgacttcagaagcaagcatctctcttccctaattttaaattcctgtagatttagaaacataactaagtttgtataaggaacagtgtcaaaaggcaaatatgctatagagttggttagaggcagtgggcagggagtaacttgaaaagcttctcatgagaatttcagagtctgaacttcaaagtttgacctcaggacatttgctgttcaaaagtttcttttacctttctttctaggcagataagatactgtactgacttccgaatagcagagtttttagaaagggaatttaaaaaaacatgaactaaccaaacttagtcattaaaataaaggcttgggattgatcatagtcactcacacctgtaatcccaccactttgggaggttgaggcaggcagatcacttgaggtcaggagttcgagaccagactggccaacatggtgaaatcccatctctactaaaaatacaaaaaaaaaatgagccaggcatggtggcgcatgcctgtaatcccaactacttgggagggtgaggcaggagaattgcttgaacctgggagagggaggttgcagtgagctgagctggcaccactgcattccagccttggtgacagagcaaractccatctcaaaaaacaaaataaataaagatttggaatctgactcagagtgttacctaaaataatcattgttatgctatatattttataccataagattataattttattcaaaatagaatatgaaaatatctagatatttactacaaatgtaattttatttatgtataatattagtgattttaagcttttattagtccaatctgcctgtctcatctgcgtctgctaaggagaagagacgcttttttttttttttttttttgagacagaatcttgctctgttgcccaggctggagtgcagtggtgaaatctcagctcactgcaagctccgcctcatgggttcatgccattctcctgcctcagcctcccgagtagctggtactacaggcgcctgccaccatgcctggctaattttttgtatttttagtagagacagggtttcactgtgttagccaggatggtctcgatctcctgacctcgtgatccacctgccttggcctcccaaagtgctgggattacaggcgtgagccactgcgcccagccaagagacgcttattgatgtttgttctgatccataccaaaataaagaactctagcaaggctgggcacggtggctcacgcctctaatcccagcactttgggaggccgaggtgggtggatcacttgaggtcaggagttggagaccagcctggtcaacacagtgaaatcccatctctactaaaaatacaaaaattagccgggcatggtggtgcacgcttgtagtcccagctacttgggaggctgaggcaggagaagtacttgaacccgggaggtggaggttacaatgagccgagatcgcgccactgcactccgtcctgggtgacagagcaagactccgtctaaaaaaaaaaaaaaaaaagataaaaccactcttgcgagtatgcagtgactagatttctagtccaagaagtccatattttctgtttaccatcagactttcagagtaatgtactctaaactgatcattattgaacgtaatgtcacttaacagaaactttcagagttattcttcccagcatgaacctgtacttgacgaggttggagagacaggaaggcgtagcaaagatgactgaactgttcttaggttaaaaattccctggctatatagctgtcagctagaatgaggaatctgaataaagtcaaggccagttagaagaattagcctgtcaactagtatattaagggaataatccacttgagtaaaaaatgttcagaaggtagtctttgcagctataagtaaaatgctgtatattgtaaattggcctttatttatagtttcatggtttttccagccatttttccctgttgcatttagataccttctaaaagtgactatatttgattataaaaattctttctcatgatgccataaatttattaaggaaccagtattttattaaattactattcttcttttgtctatattgaaacaacccccagggtatgggtacaatgaagtaaagcacttttattagatgagtagagaagtgcaatggatttttttttaatttggctttgattttagaaattatggtagagggtgtaggtataacaatatattttagaggatagaggtataacacnatattcaattatatttgccttacctggttatgagtctgtttgaataatataacttttatcatctcaatttgttgatttataaattaatgcaataaattttactttcctcaggtttagagacctttagccagttagtttatcaagattcttatggaactgtaagtatgattattatatgttactaaaaattgttagacaaattrctaatagaaaaaaatgtaacctgtttagctattgcttcctgaagatttcatttccccagatatttgtcttagccggtaaatgtaaatttcatacatttttgttgttctaaattaatattttatgaaatgcttgtataaatagatttagtcttcattgagttcaagacaacagaaaattctaaaactaaatcaaaattttattttgtcatagttcaccatcaatgaatccaccattattgattctccaaggttttctcacagaggaattttgrttgatacatccagacattatctgccagttaagattattcttaaaactctggtaagtaattacttcattctaatctgttgtctattctgaagatgtctcctttatgttgtaactttatgttggttactattgtgtagtttggaacaggggaatttgtataagcactgggcattctttcctcagttcctagggaagtgtatttcctcagctgtgacgtggaggtccccttgagaatcaccctcctgttttcagtgcgagagccacgtataacatgtatttagccaagactgttaagagaaggacagtttaaacactgcccattggccctttacatatactcccatttgtcaaatcatgtgtctagacttttgattaggaatacatggccacccaggtgcggtggcttacacttgtaatcccaacactttgggaggctgaggcaggtggatcacctgaggtcaggagttcgagaccagcctggccaacatggccaaaccccatctctactaaaaatacaaaaattagccaggcgtggtagcrtgcgcctgtaatcccagctactagggaggctgagacaggagaattgcttgaaccctccccgggtggaggttgcagtgagccgagatcgcaccaccgcactccagcctgggcgacagagcaagactctgtctcaaaaaaaaaaaaaaaaaaaaggaatacgtggccaccacaccatacttctagttagtgccatttaaattttgtgaccacctcttactttttttgtaagtggcattagaaaggagtccgggagctcctttatacctagggaactattccaaaggaatatggaacctcaggggtggtatgggttaggaagaaggttgacaataactgttttctcctatgggcttttttttattggttaatccccaccatcacctgccaatttgtaggggtggggaggtttcctcccatgtttttttgcaccttcacttgatcattatgatgamactatgctatttaaaaattattattattattatttatttatttattttgaaacggagtttcgctcttgttgcccaggctggagtgcaatggcgcgatctcggctcactgcaacctctgcctgacaggttcaagcaattctcctgcctcagcctcctgagtagctgggactacaggcatgcaccaccacgcccagctaattttgcatttttagtagagacggggtttctccatgttgaggctggtctcgaactcctgacctcaggtgatccacctgccttggcctcccaaagtgctgggattgcaggtgtgagccaccgtgcccagccaaaaattattattattattattwtttttttttctttttagttgaagtcttgctctgtcgccaggctggagggcagtggtgcaatcttggctcactgcaacctccgcctcccggattcaagcaattctcctgcctcggcctcccgagtagctgggattacaggtgcacaccaccacacccagctaatttttgtatttttagtagagacagggtttcaccatgttagccaggatgttctcaatctcctgaccttgtgatccgcctgcctcagcctcccaaagtgctgggattacaggtgtgagccaccacgcctggcctaaaaattatttttacatttacattaatactctgaattttttctccaaaagacagtcttgtcacttttaagaaacagatgcttagtgtaaaaagtttaaacaatataaatgtgcataaaataggcagtcatcccataatttcatttgccaaagattgacatacatttttatgtgctacttgtctcattttagacttaaaaaatgaatatactaggtggggtacagtggctcacgcctgtaatcccagcactttgggaggtggaggcaggtggatcattcaaggtcaggagttcgagaccagcctgaccaccatggtgaaacccatctctactaaaaatacaaaaaattagccaggcgtggtggtgcacgcctgtaattccagctacttgggaggctgagacacaaaatcgcttgaacctgggagagggaggttggagtgagccaagattacgccactgcactccagcctgggcaacagagcaagactccatctcaaaacaaacaaacaaaatgaatatattaacatatacaatgtgactttttaaaaaacttaaatgagactgtacttttgctaccccccacccccttttttttctttttgtgagacagagtctcgctgtgttacccaggctggagtgcagttggcacaatctcggctcactgctacctccgcctcctgagttcaagcaattctcttgcctctgtctctcgagtagctgggattacaggtgcccaccaccacacctggctaatttttgtatttttagtagagatggggtttcaccatgttggtcaggctgatcttgaactcctgacctcaagtgatttgcctgccttggcctcccaaaatgatgggattacagatgtgagccaccacacctggcctttgctactcttttaacagttgaatatttcattttatttagtctcatgctgatggacatctaagttaattaactattatcataaatactactgcagtgttttatacatatatatttgtacacttgataagattatttctggaggataaattcttagaagtgaatttctgggcttaagatgtatatattttattttttggtacattttaacttttggtatatactgtcaggctgccttctagacaggtcggtcatagccacatatgcttggccaacagtgtggtacatctttgccatgtttgttgctgatctaatgataaaatatatctccttgttttaatgtgcacttccttgctttttagtgaatataagcctttttttttacatattaattatttgtatattttatattataaactgtaagtttccttttttttttttttttttttttttgagacagtcttgttctgttgcccagactggagtgcagtggcacaatcttggctcactgtaatctctgcctcctgggttcaagcgattcttggacctcagcctcctgagtagctgggattacaggcatgcaccaccacacccggctaattttttgtatttttagtagagacagggttttgccatgttgcccaggctggtctcaaactcctgagctcaggcaatctgcccacctcggcctctcagagtgctaggattacaggcatgagccactgtgcccagctgtaagtttattttctatgtttattttgtcgtctagaatgtgaataccttctttattggtttaatgttttaatgttatagttgtctatagattgtgccactgatacttttatatttgcttatatgtatcttatttttaaaatttaattaatttaaattttttatatttaaaaaaaatttgtgtagagatagggtctcaccataatgcctcaaactcctggtgtcaaatgatccttccaccttggcctcccaaagtgttgggattataggcatgagscaccatactccaccttatatttatattatatacttacccatcatatgttgttgtgaattttttctaaatttctaaatttgttttaataactgtgtttataatgcctgtagacatttacattttatttatttatttatttattgagacggagttttgctcttgttgcacaggttggagtgcaatggtgcggtctcagctcactgcaacctccgcctctcagattcaagtgattcttctgcctcagcctcctaagtagctgggattacaggtgcccgccatcatgcctggctaatttttatatttttagtagaggcagggttttaccatgttggccaggctgatcttgaactcctgacctcaggtgatctaccttcctcagcttcccgaagtgctgggattacaggcgtgagcccccaygcctggcaaaatttttttatttttattttttagcaaagaaccctgctaacattttttttttttttaagagatggggttttgccacatttcccaggttggtcttaaactcctgagctcaggcgatccacctgccttggcctctcaaagtgctgggattacaggcataagccacccatgcccagccacaagttctttaaaggagtagtatatttcaatgttatcctttctatcatttttggctttgggaagtatgcttagaatcctcctctacaacaaggatataaatataaaaatagcctcttaaattttattttagtatcattatactttttcttattaaattcttgattctattagaatttactttagtgtatcaaacctattaggtattttaattttactttccaaatggttagccagtaatcccctcatttctgagcaatctacaattccctattgctttcaatgacaattactaaatactaaattcagttataattattaaatactaaattccaataaatatggaagttactttctgaagtcataatctttactactttatcttcttgggccagtacatgtggttttaatttctatagctttagcagtttttatttttgtttttgtttgtattttgaagtcttaaacttagggaaaagttgtaaatagtgtgcaaagaactcctatatactctttacccagatactccactttaaaatttttattgtatttattaaatattaaatttatttaagctatatatttgctttattctccctctctaaaaatacgttttctaaaccacatgggcacatatgatgcatcaatacccccttaatatttcaggatgaatttcttaaaaaaaggacatttaataacttcagtacaaccatcaaaatcaggaaattgacacaatactgcatctaatacgcagaccccattcaaatttcgattgttccaacaatgtcttttataggttccacatcccatccaaaatcaggtgttccgtttacttgtatgtctctttggccaccattaatctgcaactgactatctttccttgtcttttttttttttttttttttttttttgagacggagtcttgctctgtcgcccaggctggagtgcagtggcgggatctcrgctcactgcaagctccgcctcccgggttcacgccattctcctgcctcagcctcccaagtagctgggactacaggcgcccgccactacgccyggctaattttttgtatttttagtagagacggggtttcaccgttttagccgggatggtctcgatctcctgacctcgtgatccgcccgcctcggcctcccaaagtgctgggattacaggcgtgagccaccgcgcccggcctccttgtcttttaagaccatgacatttttgaagagtataggccagttgctttgtagagtatgccttagcttgtccattttccagaagataatattcagttatgcatttttggcaggaataaagcagaaatgatgctgtgttcttctcagtgcttatcaggtgacacaatgtcttatttatttcatttctggtattgttcacttataacttgcctaagatgtcatctgccaggtttctccactgtgatgttaattaaaaagcattttgtacttaacaagtaattaagtatcttgtgggaagaaatcttgagaccgtgtaaaatcccattcttcatccagcgttcactcactagttttagcatccacagatgattcttgcctaaatcagttattactaaggtggctaccgagtggtgatgcttctaattccatcactccttctatcatttattacttggcatttcagtgtaaggtagagcaatcccttctcttttatttaagtattcgttatttttatcaktgtggactcatgggttactatgttattcaggattgtaatctgttactttccctgtttttttgtttgtttgtttgagatggagtttcgctcttgtcgcccaggctggagtgcaatggtgcagtctcagctcactgcaacctctgcctcccaggttcaagygattctcctgcctcagcctcctgagtagctggagttacaggcatccgccaccacgcccagctaatttttctatttttagtagagatggggtttygccatgttggccaggctggtcccgagctcctagcctcaggtggtccacccagcttggcctcccaragtgctgggattacaggcgtgagccactgtgcccagccactttccttgtttaatagtcaaattatcccagctttggtcactggaagtccttcaagttgcctcttacatcccttgcaggttccctttaattttggagcactgtcttactttttggcacatgatgttycaggcctgtcttccctgtcccggtcttttctgtgtcctcagacttttcttcaaggaacccttttagtggtgaacaacattttgaaaccaatatctaggctctaggtgtgctcattgctactaggatgtcattgcttgtagaccctctgagcagagagagctagaaaacgtgtgtacctgtgtatgtatacatttgtatgaatacacacacatctttccctatttctrtatctgytwatatcaggagttggcaaaccataccccaaaggccaaatccagttcaccatctattttcacaaacatggggttttggtctcactgtcacccccaggctggagtgcagaggtatgagctcagcttactgcagtctcaacctcccaggctcaagcaatcctcccacctcagcctccagaatggatgggactaccggcactaccggcatgtgtcacgatgcccagctaatttcttaaaaattttttagtagagatagggtctcactatgtcatgcaggctggtctcaaactcctgggcccaagtgatcttcctgcctcagccttccaaagtactggggttacagrtgtgagccaccrtgtctggcctcacaaataaagtttacaggaatatagscacgtacgtttgtttacatactgtctcactctacarttgcagagtggagtaggtgtaacaaactctatggcttgcaaagccaaaatatttactgtctagccctttatgtaaaatgtttaccaacccctggtctatgttaaaaaccatgagtttgtattaataagctcaattccagttaacacctatatttctggctcccttctctgagagtgaaaaccctccttttatcctcaatatatttatctgcacaatycccttgtatgtaaaagatgtcctaactccatcagccaaatcccttyagccttgatgaagagggagtctttaagttttgatgatcttgttggacaaatcttctcccttattktttttcatcttttaaaaatagtgtttatattttatataaatattatattggttattcctctagagtatatataaaattaataactcaatttgcccaaaaatttctctgggggaattgtattgagtttgcaatgaaattcttggttgggactcaaatttcagaactgtgggaattataagtcctggtacttaaatgaatgctccrtttttcctttgctctattcccaaacacagtggcagccaagaaccattttgcattcttggcagactgctacatattgggaatcttgctctcctcccatacagcaaagttacaactcaccgtctagaataaatacaacatctccagaggctttttgtatactgatgtgtcatgtgaagtatatatgatgaagaatttctatttcttctcattctttctttgctgaaagataaattttagccaggtgtggtggctcatgcctgtaatcccagcaatttgggaggccaaggcgggtggttggcttgagcccaggagttccagaccagcctgggcaacatggcaaaaccctgtttcgacaaaaaatacaaaaattacctgggcatggtagtgggcgcctgtagtcccagctactcaggaggctgaagtgggaggatcacttgagactgggaggtcaaggctgcagtgagccaagatcatgccactgtattccagcctgggcaatggagtgagaccctgtctcaaaaaaaaaaaaaaaaaaaagttttaaaggaagcagacatattggaagcaattccaaatgtagataggtaatatggattgtatatgatatctgcagtaaataatttttaaatatgtttgcttgcaggatgccatggcttttaataagtttaatgttcttcactggcacatagttgatgaccagtctttcccatatcagagcatcacttttcctgagttaagcaataaagtgagtaaattgtattgtactctgtctacaaaaacattgggtatagtttcattacaagtttgtagcttaaatgtttgttcttatggatagaatcaaagtgtaaaaatcagatgtttatggtttttaatttttttggctgtgacttagcattttacatccataaaactttttttgttattgttataacggttactgtaattgttactgtgaatataaacaatcttggggaagtgtaaatcgaaatttaacaaggtagaagccctgaataattctcaaattacatatggttaagataatatatttatcaagttgtccaacagtgtatttgttttaaacataattgtttggaaatccataaatgactatttttctctctgagaaactacatgaagtagggaattttagaggtgagagtgttttcttagaaaataatggtagtctcagttaacagtgttcaaattgactgtatcatggaccaatggatctgggagggaccctcagtgtcccctagtttaatacccctgtaatacaaagaaggtacctgacatccagagaaatgatgtgccttgtgtaaagttgtggttaggaagggacagagccaggactctaaattctgtcctccggccataattccaaaactttctccaatgttaggtatgtaggctaaaatgtgctaacagcacttgtgtttttgtttccttttgttttactttttattatggcaaatttcaaacatatacagatacagaatagtttaatgaactcccatrttctcatcatgccagttcaaacatgaatacatggtcaaccttgtatcacttaaactcctgcrgacaagccctgccccatcctgttgttttgaataaaatccatcattgtatctcactgtaaaaaggcctgttctttaagaaaaaataaccataatacatgattgcagctaaaaaattaagagtaatctagacagctaatcaatattcacatttcggggggaggagccaagatggccgaataggaacagctcccgtctacagctcccagcatgagcgacacagaagacgggtgatttctgcatttccatctgaggtaccaggttcatctcactagggagtgccagacagtgggcgcaggacagtgggtgcagcgcatcatgcgcgagccgaagcagggtgaggcgttgcctcactcrggaagcgcaaggggtcagggagttccctttcctagtcaaagaaaggggtgacacacggcaccrggaaaatcgggtcactcccacccgaatactgtgcttttccgacgggcttaggaaacggcacaccaggatattatatcctgcacctggctcggagggtcctacgtgcacggagtctcgctgattgctagcacagaagtctgagatcaaactgcaaggcggcagcgaggctgggggaggggtgcccgccattgcccaggcttgcttaggtaaacagagcagccgggaagctccacctgggtggagcccaccacagctcaaggagacctgcctgcctctgtaggctccacctctgggggcagggcacagacaaacaaaaagacagcagtaacctctgcagacttaaatgtccccgtctgacagctttgaagagagcagtggttctcccagcacacagctggagatctgagaacgggcagactgcctcctcaagtgggtccctgatccctgagcagcctaactgggaggcaccccccagtaggggcagactgacacctcacacagccgggtattcctctgagacaaaacttccagaggaacgatcagacagcagcattcacggttcacgaaaaaccactgttctgcagacaccgctgctgatacccaggcaaacagggtctggagtggacctctagcaaactccaacagacctgcagctgagggtcctgtctgttagaaggaaaactaacaaacagaaaggacatccacaccaaaaacccatctgtacatcaccatcatcaaagaccaaaagtagataaaaccacaaagatggggaaaaaacagagcagaaaaactggaaactctaaaaagcagagcacctctcttcttccaaaggatcgcagttcctcaccagcaatggaacaaagctggacggagaatgactttgatgagttgagagaagaaggcttcagaagatcaaactacgagctacaggaggaaattcaaaccaaaggcaaagaagttaaaaactttgaaaaaaatttagacgaatgtacaactagaataaccaatacagagaagggcttaaaggagctgatggagctgaaagccaaggctcgagaactacgtgaagaatgcagaagcctcaggagctgatgtgatcaactggaagaaagggtatcagtgatggaagatgaaatgaatgaaatgaagtgagaagggaagtttagagaaaaaagaataaaaagaaatgaacaaagcctccaagaaatatgggactatgtgaaaagaccaaatctacatctgattggtgtacctgaaagtgacggggagaatggaaccaagtcctactctgcaggatattatccaggagaatttccccaatctagcaaggcaggccaacattcagatgcaggaaatacagagaatgccacaaacatactcctcgagaagagcaactccaagacacataattgtcagattcaccaaagttgaaatgaaggaaaaaatgttaagggcagccagagagaaaggtcgggttacccacaaagggaagcccatcagactaacagcggatctctcggcagaaactctacaagccagaagacagtgggggccaatattcaacattcttaaagaaaagaattttcaacccagaatttcatatccagccaaactaagcttcataagtgaaggagaaataaaatactttacagacaagcaaatgctgagagattttgtcaccaccaggcctgccctgaaagagctcctgaaggaagcactaaacatggaaaggaacaaccagtaccagccgctgcaaaatcatgccaaagtgtaaagaccatcgagactaggaagaaactgcatcaactaacragcaaaataaccagctaacatcataatgacaggatcaaattcacacataacaatattaactttaaatgtaaatggactaaatgctccaattaaaagacacagactggcaaattggataaagagtcaagacccatcagtgtgttgkattcaggaaacccatctcacgggcagagacacacataggctcgatataaaaggatggaggaagatctaccaaggaaatggaaaacaaaaaaagkcaggggttgcaatcctagtctctgataaaacagacttttaaaccaacaaagatcaaaagagacaaagaaggccattacataatggtaaagggatcaattcaacaagaagagctaactatcctaaatatatatgcacccaatacaggagcacccagattcataaagcaagtcctgagtgacctacaaagagacttagactcccacacattaataatgggagactttaacaccctactgtcaacattagacagatcaacgagacagaaagtcaacaaggatacccaggaattgaactcagctctgcaccaagtgaacctaatagacatctacagaactctccaccccaaatcaacagaagatacatttttttcagcaccacaccacacctattccaaaattgaccacatagttggaagtaaagctctcctcagcaaatgtaaaagaacagaaattataacaaactatctctcagaccacagtgcaatcaagctagaactcaggattaaggaactcactcaaaactgctyaactacatggaaactgaacaacctgctcctgaatgattactgggtacataacgaaatgaaggcagaaataaagatattctttgaaaccaacaagaacaaagacacaacataccagaatctctgggacacattcaaagcagtgtgtagagggaaatttatagcactaaatgcccacaagagaaagcaggaaagatccaaaattgacaccctaacatcacaattaaaagaactagaaaagcaagagcaaacacattcaaaagctagcagaaggcaagaaataactaaaatcaaagcagaactgaaggaaatagacacacaaaaaacccttcaaaaaattaatgaatccagaagctggttttttgaaaggatcaacaaaattgatagaacgctagcaagactaataaaaaaagagagaagaatcaaatagacgcaataaaaaatgataaaggggatatcaccaccaatcccacagaaatacaaactaccatcagagaatactacaaacacctctatgcaaataaactagaaaatctagaagaaatggataaattcctccacacatatactctcccaagactaaaccaggaagaagttgaatctctgaatagaccaataacaggagctgaaattgtggcaataatcaatagcttatcaaccaaagagtccaggaccagatggattcacagccgaattctaccagaggtacaaggaggaactggtaccattccttctgaaactattccaatcaatagaaaaagagggaatcctccctaactcattttatgaggccagcatcatcctgataccaaagccgggcagagacacaaccaaaaaagagaattttagaccaatatccatgatgaacattgatgcaaaaatcctcaataaaatactggcaaaccaaatccagcagcacatcaaaaagcttatccaccatgatcaagtgggcttcatccctgggacgcaagcctggttcaatatacgtaaatcaataaatgtaatccagcatataaacagaaccaaagacaaaaaccacatgattatctcaatggatgcagaaaaggcctttgacaaaattcaacaacccttcatgctaaaaactctcaataaattaggtattgatgggacatatctcaaaataataagagctatctatgacaaacccccagccaatatcatactgaatgggcaaaaactagaagcattccctttgaaacctggcacaagacagggatgccccctctcaccactcctgttcaacatagtgttggaagttctggccagggcaattaggcaggagaaggaaataaaaggtattcaattaggaaaagaggaagtcaaattgtccctgtttgcagatgacatgattgtatatctagaaaaccccattgtctcagcccaaaatctccttaagctgataagcaaattcagcaaagtctcaggatacaaaatcaatgtgcaaaaatcacaagcattcttatacaccaataacagacaaacagccaaatcatgagtgaactcccattcacaattgcttcaaagagaataaaatacctaggaatccaacttacaagggatgtgaaggacctcttcaaggagaactacaaaccactgctcaatgaaataaaagaggatacaaacaaatggaagaaaattccatgctcatgggtaggaagaatcaatatcatgaaaatggccatactgcccaaggtaatttatagattcaatgccatccccatcaagctaccaatgactttcttcacagaattggaaaaaactacttgaaagttcatatggaaccaaaaaagagcccacattaccaagtcaatcctaagccaaaagaacaaagctggaggcatcacgctacctgacttcaaactatactacaaggctacagtaaccaaaacagcatggtactggtaccaaaacagagatatagatcaatggaacagaacagagccctcagaaataacgctgcatatctacaactatctgatgtttgacaaacctgagaaaaacaagcaatggggaaaggattccctatttaataaatggtgctgggaaaactggctagccatatgtagaaagctgaaactggatcccttccttacaccttatacaaaaatcaattcaagatggattaaagacttaaacgttagacctaaaaccataaaaaccctagaagaaaacctaggcattaccattcaggacataggcatgggcaaggacttcatgtctaaaacaccaaaagcaatggcaacaaaagccaaaattgacaaatgggatctaattaaactaaagagcttctgcacaggaaaagaaactaccatcagagtgaacaggcaacccacaatatgggagaaaattttcgcaacctactcatctgacaaaggaaatatccagaatctacaatgaacacaaacaaatttacaagaaaaaaacaaacaaccccatcaaaaagtgggtgaaggacatgaacagacacttctcaaaagaagacatttatgcagacaaaaaacacatgaaaaaatgctcatcatcactggccgtcagagaaatgcaaatcaaaaccacaatgagataccatctcacaccatttagaatggcaatcattaaaaagtcaggaaacaacaggtgctggagaggatgtggagaaataggaacacttttacactgttgggactgtaaactagttcaaccattgtggaagtcagtgtggcgattcctcagggatctagaactagaaataccatttgacccagccatcccattactgggtatatacccaaaggactataaatcatgctgctgtaaagacacatgcacacgtatgtttattgtggcactattcacaatagcaaagacttggaaccaacccaaatgtccaacaatgatagactggattaagaaaatgtggcacatatacaccatggaatactatgcagccataaaaaatgatgagttcatgtcctttgtagggacatggatgaaattggaaatcatcattctcagtaaactatcacaagaacaaaaagccaaacaccgcatattctcactcataggtgggaattgaacaatgagaacacatggacacaggaaggggaacatcacacactggggactgttgtggggtgggggaggggggagggatagcattgggagatatacctaatgctagatgacgagttagtgggtgcagcgcaccagcatggcacatgtatacatacgtaactaacctgcacattgtgcacatgtaccctaaaacttaaagtatgataataawaaaaaaaagaaatgctttaaatttwaaaaaaaaattcacatttctccaactgtctttttctcttatttaaaaaattattttaaaacatttgcagtgggatacaaataagctccataattgtggtgagttaatatgtctagtaattcttttttgatctacaggtcygctcttcccacctttttctcctgtaattgttgttgaagaaactgagtcatgtgtcctacagtttcccacagtctgggttttgctgattgcaccccayagtgtcaattaatatgtccctgtatttactataaactggtagttgaatctagtcttgatagaaatttgatttgcagtgctgggagacaagactgcttttccgcaactgagcacttataggccatagtttgagaaatgtgctaaggaacagctcacaactttagttacaaacaatattgagttctaatttttcaagtgacctataaagggactgaggtaatcattaaaaaaaaacaagtcacttattctggagtctatatgggaatttttcaagcttatagtaattcaagctgatagtcctttgaaggacaacagctatgctttgtaataaggtgtgcattttgactctaaaattgacaagagcagtgttttcggaagtttcactttggagacatttgttttgttgtattcttacatggaagttgaaacagcatgatagtagaaactcttgaaacaggaggcactgatggagacagatatttctaccagtaaatctgcggttagcccaaagtatactgagaatttattgctaaaatatggtaaacaaatgatttgacaaaagccccaaaatggctatcatcctttgagtatgtacgacttagtagaaattttctttctgaaattttctactcctgaaactatggcactatattatttttaaatgagtcatctaatatcacatgaaactaatacattgtcatagtgaaaaaattagctgtcaaatatcaaatgcaagcacaattgttaacaatttccaggatcaaatctacgttgtacattttaacttgaataaatatggcttttacagggaagctattctttgtctcatgtttatacaccaaatgatgtccgtatggtgattgaatatgccagattacgaggaattygagtcctgccagaatttgatacccctgggcatacactatcttggggaaaaggtaaggagttgtattttatttcattttatcttattttttattttttgagatggagtcttgttctgtcacccaggctggagtgcagtagtacaatctcggctcactgcaacctccacctcccaggatcaagcgattctcctgcctcagcttcctgagtagctgagactacaggcatgcgccaccatgcccagctaatttttgtttttgttttgttttgttttttgagacggagtctcactccgttgcccaggctggagtgcagtggcatgattttggctcactacaacctctgcctcccaggttcaagcgattctcctgcctcagcctactgagtagctgggactacaggcgcccgccaccacgctaattttttgtatttttagtagagacggggtttcaccgtgttacccaggatggtcttgatctcccctcctcatgatcggcccgcctcggcctcccaaagtgttgggattataggcgtgagccactgcgcctggccaggagttgtattttataagttgcaaaagtgaatatttgaggtattgcatttcttattttatgacctagtgtttgctcattttgttcttaattgtgattggcctatcagtaatactattgacagatacaattcaatagctactctgtgtctattgtgagcaagtcattgtgattaggtactgcctaaagtataaaaaagggaatgaaagaaaacaaaaagtgattacaaaaagtagaacatgataagtgaattcaagaaatggtttcatagatgaggtaacacttaaaatgcttttgagtgatcacagaatatattcatgtttctggtagaggaaatggcataaggaaatgtgtgcaaaaagtgtaagatatgcttgacaagtatgtagctggagtagagtgtagcagagtaggaggcattatagggtggtgattaagaactttggctttggagccagacagcttgggtttgaatcttgcttctgccattataaactaggtgaccttgggcaagttacaatatctcatcttcagtttctccatctctaaaatgagaattagtagtagctatcatgtaatttttttgagaattaaataatgtaaagcacatagcacagtaccaagcatttataattgctcaatattattagagtagacatggggaatagtgagaggtaaatctggaaaagcacattagcgggcctttggtgaggaatgtgaacttcatcaggacacactggaaaccagtgaaaatttctgagcagaggagtaacatgatgggaaccacactttgggaaaacctttgggaaagtgacagattggagttctggaccaggagggtgatagtgggaatgtaaaataatggacagaactgagagacattctggaaatatccatagaatttggcaactgatggactccaggagagaggaggtatatactctaggatgacgatggtacccttattagaatacgaaaatcaggagaagctagagaagggagcttaaggactgcagatgttgttttttgttagcttgtatttgaagtacagctaggatattcagttgtatccagcagggaatttgaaatatgaattgaagctcaagaaaaagcgttgaggcaaactgaagatttgggagttactaacatttgacatagataaaatctcagatataatgggaaacaaagaggcaaagagacaggattcaggaaacccttcttatctggaagaaattactagctcttagtaaacatgttcatcttttgtgtataaaatcttgtagcttcaataaaatgacgtagtaaaatcatgtggaaaaccagatctttataatgagtacacttcttttaaaaagaatcttaatattttcttctaggtcagaaagacctcctgactccatgttacagtagacaaaacaagttggactcttttggacctataaaccctactctgaatacaacatacagcttccttactacatttttcaaagaaattagtgaggtgtttccagatcaattcattcatttgggaggagatgaagtggaatttaaatgttggtaagatgattccttaaaacccctttaaaaaaaaaaaaaagagaggctgggtgcggtggctcacgcctataatcccagcactttgggaggcagaggcaggcagatcacctgaggtcaggagttcaagaccagcctggccaacatggtgaaaccccatctctactaaaaatacaaaaattagctgggcgtggtggtgggtacctgtaatcccagctccttgggaggctgaggcaggagaatctcttgaacctgggaggaagagattgcagtgagctgagatcatgccactgtactccagackgagtgacagagtgagactccatctcaaaaaaaaaaaaaaaaaaaaaaaaatggaataaaaaacctgttgcattgaagtagctgtagagggctccacaccataaggaagacttaagagtaacatgcctgcttgtaagggtttaaactgggcaacatgactcctgagatggtagatttgtggagaatgtacattttggtatggcaaagtaaagcttgaggaaaaacaagatgcagaagaaaatggagattcaaaaaaagactactgtgaaatgagaacacctttagtgaaagagggcaatcaatgattaaataggaaagatttttcaaataaaaattctctctgcaaatagctttagatggaggagaaaggtggtaaggtaaagaaagccatttttaaaggaaatcagcttcttgaaaaaattgtttgcaatggataattaagataacttgtaattaagtttttaggcttctttttactacctacaaactttaatagttttaagtctgcacaactgatgttaggcatgtatactgctctaaataataaactgagcatatcaaacttctaatgaaattttaatcactttttgcttcagggaatcaaatccaaaaattcaagatttcatgaggcaaaaaggctttggcacagattttaagaaactagaatctttctacattcaaaagtaagttgtttgaaagcctatttctgtattaatgctttttgtaaaagtttatttagtaatgtgctttattttttacattttctctacawcctttgcctaagtgtagatgtgaaaaatcactaaaggaggcaatacccactgcttgctttaaatcagtaacatggtgactccaagtattttccaatagctgttgaaatataggaaggcagtcatctgttctaaaaactcagattgggctgggcatggtggctcacacctgtaatcccggcactttgggaggccgaggcaggtggatcaccggaggccaggagttcgagaccagcctggccaacatggtgaaatcccatctctactaaaaatgaaaaaattagccaggcatggtggcaggtgcctgtagtcccagctactcgggcggctgagggagaatctcctgggagatggaggttacagtgagctaagatcgcaccactgcactccagcctgggcaacagagtgagactgtctcaatcaatcaatcaatcaatccatcaataaatataaaactcagcttgaagccctggctaccctgtgaagtcttcactaccatccagcccctggaattcattccattttgtcaattccaggaacatatattttactatatacctgtgctacccaatacagtagccatagccacaggtgtctgtccatatgtaaattaattaaaattaatgaaagttaaaaattcagctactcagttgcattagccacatgtcaagtgttcagtagccagctgaggctagtgactgccatactgaaaaatgcatatatatatatatatatacacatttccatcccaggaagttctactagaccgtgctgctctagagggattggcaaactttttctgtaaagggtcagagagtaaagattttaggcttcatgggccacatacaattgcccatggaccacatacaatttttttttaacttaaaaaaaacctcaaattttaaaacttaaaaaaaaatgctttacaaatataaaaaccattcttagcccatgagacatacaaaaacagcctgcaagctgtagttgccaacccttatgctgtaccatttatttggcaagcccaggttccagcctttgcctgttcagctttttgtgtgatgcatttaagtgttatttatctgcagagcacctggcattatgtaaatatctgtaaatatttgtggattgtcagtaactgttacatgtaatttatgtgatatgacaggctagatcgtggtccctaccattttaagacagccataaaattgtaagagattgctgtttgtacaatttcctgagttgcctaccaactcaatttgaggccacttcttcctatcttaggggcatgtttaactcattcattcagcaaatgattattaaacccccatactatgttaggttctgtatcaagtgctaaaaaggaggaactacttgtgacacttcccaacttgagctgcttctgctataaagctgaactatactaaaaggcacctctcaaaatgcaagaaatccttggtagaaaatgtacatgttttaaatatattgttaagcttatgatctaaaataactataatttttttgtaatactagggttttggatattattgcaaccataaacaagggatccattgtctggcaggaggtttttgatgataaagcaaaggtgagcattgtgaagactgcatctgatcaatataagagacttaattatttttcttggggcaactgggaatttgcaagtctaactactagtattacctttctagtgtagttagtgaccactttggacctcatagttccaagctaggtttggtagaaataagactaaaatgcaagtctcagctttagttaactgaacctatgtggtatccatatataagcaaaagttaaatattcaaacctaaggttgatgaaacttttaagtccctaaaatgagtatcacatggcactaactctgaagaaaagaggaaaaagaaaatgcagattttttttaaggatcttagaaaattatgttcctagtaataatgccttaaactttcaatttcatctactgttctaggcctaataatatgtattgcaatttgtaacgttaatagcttgcgccgggcacaatagttgaagtatggaaagacagcgcatatcctgaggaactcagtagagtcmcagcatctggcttccctgtaatcctttctgctccttggtacttagatttgattagctmtggacaagattggaggaaatactataaagtggaacctcttgattttggcggtaagtgaagcagttggtccaagtgttgtgggttactgtgaagctgatggtaagtgaagcaaccattgttacctttgttttatgagttttcttccctaacctcccaccccagaagtctttacctagatattacctaccaactatcttttatgtttgatccttgattttatgtgtttttttaagttcagtatcattttaaactctcaagaaaccatacagttgcctaaattcaagaacttcaaaagtattatagatccccttagattttatctccattttcagtgatggctcctcactctctacattctaaaggtatttgattgcattaaccttacatgccctcttctgaactgcttctccaatgtaagacacctaagcaaagctatagttttagttcagtggatttcaggctgtgttgtcttaggattctgaggagtagaatccttggtggatgggacaggagggaacatctgaagggtggagcttcaggctctcagatccccttcataaaaaacattctagtttgtccaattttgtacattagcctttagtgmaaaatcactgaaaaaggattttgctgtttaaaaaagtttcaaaaccataggtctattaagaattgataattttatatacaatgcattttatgaggaccaaaaagcgataattactgatttttaaaaagcattaagtggctgggcacggtggctgacgcctgtaatcccagcactttgggaggccgaggcaggtggatcatgaggtcaggagttcaagaccagcctgcctaagatggtgaaattctgtctctactaaaaatacaaaaattagccggacgtggtgatgggtacctgtaatcccagctattcgggaggctgaggcagagaattgcttgaacccaggaggtggaggttgcagtgagccaagatcgcgccactgcactccagcctgggtgaccaagcaagactccatctcaaaaaaaaaaaaaaacacacacattaagtattcaatttctgttttaaatgccaagaggtagaaattaaaggtaggcatggtggtcacagtccactaaaaaactagtattccaacttctattccctggcacactactaaataggcaaccagggatttaaaaaatggtttctggtgtccaggtaagtttgcataaaaccaaaataaaactgtttaatactggcccactacattaatctatggtgctaacacgtgctgtgaaccgtgggtcagggctggggataaagtttgcaaccatttttttggggggtgggggaagaggaggggccatcttttttgtgccacaaccattagcatctcccaaggtcctgctaaccacgggcaagaaatgttgccctaggataaagatggaggaaacaaatcttgatgaaatattgcctctgtgtataagctttgaacttctgaacttaattcaatgattttaatttaggtactcagaaacagaaacaacttttcattggtggagaagcttgtctatggggagaatatgtggatgcaactaacctcactccaagattatggtatgggatttacctgataacatttaagaattaaggtgccttagctttccttctctgtctaaacacaaaagtgctaaacataaatttaaactgcttgcggggggatgtgtgatttaaattttaggcctcrggcaagtgctgttggtgagagactctggagttccaaagatgtcagagatatggatgacgcctatgacagactgacaaggcaccrctrcaggatggtcgagtaagaaatctattaagtccagtgtgatttttaaccttcttattcagtgttagtttcttttgctataaatagaaatgtatgttacctaacaaatagtaattagaagaaaccaggaattatttttttgtaagtaataatacctgtaaagatatattcagacttgtgactgttttatagatacaaaaaatgttggtgtaacttagaactccatcttgagttgctttaattttcttcccttattttcagtaatgctgtgatttagtgattctaatttaagtttctaagatgacatgaatatcaatctaaaatatctttatgaatgatatcaatctaaatcaatctaaaatatctttattcatgttatctacagacgtggaatagctrcacaacctctttatgctggatattgtaaccatgagaacatgtaaaaaatggaggggaaaaaggccmcagcaatctgtactacaatcaactttattttgaaatcatgtaaaataagatattagactgttttttgaataaaatatttttattgattgaacctttgaccctctatcttattacatttagargcctggcatctttcttgtgagacaagcttaaggacacaaaagaaacacaactttgtgataccactcttctgaaggctacttatagtaataacttcatagatgaacagcatgattcaggtacagtggctttaaacatcaaagcacatttctcattatataaattaaaacgggtggctccagtgccactatcaaagcttaagttatatcttttatctagttctctgaatgtactgaaacagtactttattcgtccaataaataaagcaataaaaattgttcttactgaaaatgaagtagctaggtgctcctgaatttctctccaaaaactaaaacatttaggtcaaaccacttctcyggttgagcagtgtattttgatcttgaggattcatggcttgataagtagatagttctaaggcaaaagtagctgagcctgatgttagcgttcsaagcacagttgaataaccctaatcaaaataatttaagtcatttatattatcaaatttaagcctcaagtttctcttcctgctgattatcttttgactattagggaaaagtgatgttgccacttttgtggcttagccatatcacttcctccaaacagatgatttaacttttttcagggtaarttggatataaaaacattgaggacagaaagcagagtagtgcaagtgtgctgcagatgtatttgttagatggctttgccggcaacccaggtgcctgtcctggagcagaagaggctgacgggagaagaatgataacttgccttaaaactgacaatggtggaagtaagataaatgcttggcagggaaaaaatggtcatataggctggtaccacattttgggactgtaaatacccccttgtagtgctataatccctggatttcgccaacaatttaaattcaaagtcctaaccattcctgctggttgaaacgaaacttaacatgtattctctaaatcaaagccttaatgtttctttcaggttactgattgtctattcattggcatataatatcccctgaattaagaagaatatgtacttttcagttacaaagtacctaccataatttctgctaagggaacaaatccaataacaactttgttgtcctggcgagtctgaatttcctgaatgtttcctcttctttgtgccagatctgccaggacagggctgagataatctctagctactgtaacctcaagattcatcagaggctccaaaacttgcttatcagctttcttcagagcctaaagaaattaaagaatgttaacttatctttcataaataaaaacttaaaataaatacagcctagagctcatacaaaaagacataagcttgctttaactctctctttaaagataacgttttataagatggcaacaactataatatttgcttgtataataagcatgataacagaatttatagatcttttgtatggtatgatgcaaggggatgtttataaaaaatgcctgtgaacatgtggtcagagtcacagaaagtcctcccctttcaaagattcatttgttcatatttaaacctcatgtttctgttcctgatgtctataattacagtccatgccatgccacatgccagagacagcaataaaggggagagcttaaaaaaaaggaaaaatttagtgcaataaggtagtagaaacattatgtaaaatcttttcttatttagaatcttagatttcaaaggccaagaagaacatgcataaagaatgtggaaactgaaaatgtctttcagaataaaataatggaattgaaaaggatgtaaaaattaagagaaaaaaatcctaaaaaagattgaattctgcatatctaactagggcataccatgctcacagaactgttcttagtcctcttttcacaatcttttcctgtcaatattacctatctggagagcttcaaaaacgacttcaacatggcttcctcaaaaacgttaaatcctatgcagcccatagtttgagtgctccagtcctgtactccattggcctgctttgggatagtgtctgaatatccggcagctctccaacatgtcccacactgagctcatcattttcttctccaaacacttctatgcacatccctttttctgatgatgacatcagtagtcttcagttcacctttgacttccttttccccaagtaagctgtaagattttttttgtttttcccattcctattgctggcatcctaggtcaaacttagtccatttcctgtcctctactatctcttccctattcaaatcccttctgtactttgatacttctctcttcgaaacctttaaattatgctccaccattctcagaacaaagttcaaactctttaatgtagtttttaaagttttctctacagtctgaaaccattttactttttcaacacacaactcccctgccttcatctggtactacagttaaaaggactcttatctgtgtctggaatgtcccccaccatgctcacgtcctccaaaatcatctcagctcaaatataaatctttccaagaatcctccccaattccctgcttcctactactttcatggcattcacccattttatctaatactttggctatatttaattcccttatgaaatcacaagctcctttaggtagagtaaaatataatcctatttgtgtccttctcagtgcctggtgaactataagcacaacacagatgactcaataaatacatgaagcacttacaagcagagagaaggagattccccattagaagaagcttaacaagggtagcagtacttccattaggagtgttttgtttgaagtaacgaattaacactaatgactaaatgtaagcccccataaagttaattcttgttctctggcataatcttattaaaaaggcaaatgaacatggaaatgcagactttatttttagaaggcatattacattttgaaggacaggccaatatattgagggcttggggtcaatttagaaactgcattatttttcagattaccttagtttcaatattaaaaccaatttccagagaaactttaaaaattacttggggatgggcatggtggcttacacctgtaatcctagcactttgggtttgggaggccgaggttggcagactgcttgagcccaggagttcaagaccagcctgggcaacatagtgagaccttgtctcttaaaaaaaaaaaaaaaacaatttaaaaattacttgagggtgaattttctcaacaatatcgtcataactactttgcaggtaacatttccaacatactcttaggtgaacaatatttaaacttttttcaaagctttgtttttaatcaaaaagctttttaagaagtataaatttaaactcatgtcgaagagatatcaagtttggctttcttaggttaggggtttggaatacttaaattaactttgtaatttcggattcaaataaaactacagaaaattgggtctcaaacacagtccaagtattaaaaaatggctataaaaccaagtataaataatgcaaaagcaatcacctaagaaattagggtagttcaatgctgagaagaatgcatggaatcagcattcagcataccacactcctgggagttaatccagttctggtaggttcatgaggcaggaagcggagggtccacgacacttaaggacaaactccccagataaccacaccaagaagacccattgcttgatgctttgagaagagaaggtgcttagcctgaatctgttattcagtgggacttaactggtttcaatggtccttgattaaagcaatctttataatttaatataagtagagaaatatatggaactctataagaatttgcatgtcatccttgtgcagggccatgctaatcttctctgtatcgttccaattttagtatatgtgctgctgaagcaagcactaaagcaatcttatttgaataacaatctccaaaactggaaccaatattggatcttcagtgttctttagattacagtccattttgggccaagctaacctcaaatctggcttctactcaaacctaccatgcttgcctctaatagctgtctgtcagggatggggaaagcagaaatgtcacttaaggaagcttgcctctttatcagagtatattccaatagcaatccatgttacatagtaatttctaagatcctctttgaaataaaaacctggtgattaagaaatcagagattctccatgataagaactcttgttgaccacaaggctgaggaggcaaagacacaagataaggctctgtaaacacagctgtctgcaagatcagtggtactatactcagaagagtcaccttaaagccataaggattaggatagttctataccttttgcacgcatcttgagacacaggcagaaatcatagttgtggaggtgccaggatgaattgtcagggaatgtaaagtaattgctacatcctgaattggggatccaagcaatggtcctagacaagggaaaaaaattgtatcatactctgctagatgtgaagtgagaagtaactgagaagtgcaaaggaatagggagaaaacactaacaaagttaggaaaaagactgaaataatctgtaatataaggagtgattaaatggttgagtgggatactaatgcttactctcatttgagtgtcttaccttggagacatgcgctgtgaattccattttcaatggcctcttgggagaccttcaaaaggccttcattgatactttcagcatactcaaactcaatcacaggcataacagatgatgtttcaattggccttgcttccacttctacagtcacaagatgccttttgtctcctaaagttctatctaaggtatctgtaaacaaattgaatatggcacctcagagattaattctggaaaggtatcaaggtactataaacagcaaaattatcatcaacaagctcagggtctcatacaagataaagtgggagagaatattaacaatggcactaaatacagtataaaaatcagagtaaagagctctaccaacaaagcatctgcttctgtgttgatcaatgttaaaaacctgctctgtatcacctattgttttaacattaagatatgttgaggcacatgttacgaagattatacttttaaacttttcaaaatgtcttgtaggtgattgaaatcctcttagttacaaacttttatattaaaaaaattaaatgataaaacctttacaaatataaaaggtaagctaatgaaaattaaacgactttaaatcctgacaacccacaaaatgttttatattgtgtatttttccagcaatattttatgcacttactgtttacaatttctttcccaaaaaaccagtaaagtgtttttggtaagattgaaaacagcatctcttatttgctaaaaaccaacaatctccaatattttactatgtctgttaccaatctccaatattttactaaaacaaaactatgccatatttatgtgagggaccatgtaatgcagtgattcatggcccaaattcaaaactaagaattatagtctataattcttcataattcctttgtatgcttacgttttatactgtgaaacattttctatttaaaattatacaggctggatgtggtggcttacacctgtaatcccacccagcactttgggaagccaaagtgggaggattacttgaggccaggaatttgagactagcctgggcaatatagcaagactccgtctctgtaaaaaataataaaaattagctgagtatggtagtgcacacctgtagtcctagctacttgggagactgaggcgggaggattgctggagcccaggagttcaaggctacagtcagctaagatcttgccattgtatgccagcctgctcaacagagcaagacattgtctcaatatatacatgtttatatataaatatacgtttatatatgagtatatacatatttatgtacaagctaaaaatgagcattcatgaaacctaaaactactaaagagagtattaccaatatttagatgccttctgaagcaaccactatcatatgttatcctcattattttctttagtgttatatcacatatgcatgtatttctaagcaatagtttacttctgcttcattttaaatttgttatgccatatgtatacggcaacttttttgttctatgtgtttgggagagtcgtctgcactattttccgactccagccctactccccaacttctaacagtcagcacttggcattccactatgaggaagacccctccctcttcttccctatttacctatgtattattataagtatgaacttagaaactattttttcccaatggtctatacttggtattcaaattaatccagatttggccagcagagtctcttcaagctggttcctgtgtccttatataccccctcaccatcattttttgaccatttcctctctcacacatagcatgatattccattatcctttcttatgttttatttcatttttaattaacaaataattgtatatatttatggggtatgtgatgtttcaatacatgtatacatcgtggaatgataaaaatcaggcaaattaacatctatcatgtcaaaaaacttatttctttgtactgagatttaaaatataaattattaactatagtcactgtgctgtgtaacagatcatgagaacctatttctcctgtccagctgaaactccgtaccccacttcatcaacatctctcctttccccagctttccaatcctcagcctctggtagccatcattctactcttctacaagttagacttttaaaagttccacatatgtgagatcatgcccatcgcacctatttttgatcgtttcttgttccttactaacacaagtggcccttgaataatgtgggggctaggcgtgctaaacccccatgcagtaaaaaatacatgcctaaattttgactcccctgaaacttaactactatagaatactgttaacaggaagacttaccaacaaataaacagtcaattaacacgttacatgtattttatattgtatttttacaataaactagaaaaaaaagttaccaagaaaatcgtaagagaaaatatatttactatttattaagtaaaagtagaacatcataaaggtctttatcctcgtcatctttgcactgaatagcctgaggagtaagaaaaggaggggtttggcttgctgtctgagggatggcaaaggcaggacaataatccatgtgtaagtgtacctgcatacatactttaaacccatgttgttcaagggtcaactgtactttctatcgcctctcttatttcttcaaagatagtattttatattctacatctcataattccaataactgaagcctttgctggta

SEQ ID NO: 95751 - DNA, 58161 bp, Homo sapiens
gccaccacagctagcctctgaaaagtttttttttttttcaccctgtaatagctacctagcaacatacccagatttttactgtctagtcatctacacttagacttactaaggactttatatataccaggccactatgctagctcacaactggctcacttaaacacaataacctcacaacaaacacatcccctctcctctgttttcaaatgatgtaacaaggatcagcaggttaaatgacttgtttccagattaaatggtgagtggtaaacagactcaaaccttaatatcctgattccaagtctttatataactcggctaccttccatgatgaaaaaaggagtggactgtcagctttctttaggttgatggcaatatgagactggaggagacccagaggagtctttgttacagaaactggttatggagtcacccagtcacctaataaggtcttttagggtgtagtactttaaacgtcacaacattttgcagtcttcatttttgtgtgcatggggatggggggaaaaaatcactaaatcagtttcttagtaacagactcattaatcaagcttgtaagaaactgacaccattcaggatgccatctgattataatgacaaatctgtgaaactacagaaaacctagaatagcctgacttgtatattctctccctgtagaactgttaaggctaccaaaatatattcagactatgaatatgaaaccaaaacaagtcgagtccatgatataatccggggtgggcaaacattttgtgtaaagaacccaataggtaaacactttaggctttgtcaggccatatggcctctgttgcaactgctcaattctaggggtaggggttatgcaatatgtaaatgaacaggcatgactgtgttccattaaaattttatttacagaaacaggctatttgccaatattttaatctattaaaaattactcacgttggccgggcacggtggctcatgcctgtaattccaacactttgggaggctaaggcgggcggatcacggagatcgagaccatcctggctaacacggtgaaaccccgtctctacaaaaaaatacaaaaaaattagccgggcgtggtagcgggcacctatagtcccagctactcgggaggctgaggcaggagaatggcgagaacccgggaggcggacgttgcagtgagccgagatcgtgccactgcactcccgcctgggatacagagggagactccgtcccaaaaaaaaaaaaaaaaaattactcaggttgaacactaggattatggcatgttgcaactttcctctctctgatactttgtttttttgaggctgtgtatctaactgggagaatagttcagtctctttgaagggattttgcaaaaatatatcttcaactatgtttctccccaggggtggggaagtttggggtcacattactattgctgccttcaacagaaattaagctatattaaattatcttccttttttcaaagattttctttttctttttttcttttttttttttttttgagacagaatcttgctctgtcccccaggctggagtgcagtggcatgatctccactcactgcaagctctgcctcccagattcacgccattctcctgcctcagcctcccaggcagctgggactacaggcgcccgccaccatgcccggctaatttcttgtattttttttttttagtagagatggggtttcacagtgttagccaggatggtcttgatcacctgacctcgtgatctgcctgcatcggcctcccaaagtgctgggattacaggcgtgagccaccgcgcccggcttttcaatgattttcaaaagcatttagatactttccttatcaaactggaattgactcttataaaacagtcctactcaagttttcgaactgctgtcaaagacaagaagtgttttgagacctagacaatatcaggcatattgtagatcactagtttaatgaggaaaatatgactgtggaaaatgaagattctaatatgtcatgtttaaaagtcagaattcactgacaatgtcttatgatactactttttcaaatctctcacgaagctgaaaagattttttttttttttgagacggatttttgctcttcttgcccaggctggagtgcaatggcgtgatctcagctcactgcaacctccgcctcccaggttcaagcgattctcctgcctcagcctccctagtagctgggattacaggcgcccgccaccacgcccagcttattttttgtattttttagtacagatagggtttcactacattggccaggctggtcttgaactcctaacttcaggtgatccacccacctcaacctcccaaagtgctgggattacaggtgtgagccaccgcactgggctaaagatttttgactagtggaaaaagtactaaataacttctgtcaataaaataacaaaaattgcataaaaatatctttcaacctgttccacatcaatttaaagaatttcaggaaatgataatgttctttatccgatttaataaagtcaactaacatttcggtcattacactcttccaaggacttaccattggcctgatgaatctttcatatttaggtggttttcttgtaaagccatctccaacaaagcacactttagtaaccattctcttccatgccttcttctttctctttcctgttcgaataacttttaatacttctgtttctccctgggcacgtactttaggcagagggacttcccattttccctaaaaatatgccacagttaaaagtttatattgttattaaaggacaatgagaataagtcaaatatgttttagttgtacaaagtaatagatctattttttttgcttgaccatcaacacatttttggctcaaccgtcttctagaggtctgtattgtctcataagctgcaaattaaacagaacaagtttatatatcatgggtatgttaaataaatggttggcttaagctaaaaatcttaatgctgtgttatgggtgagaaaataccacctgtaatgtggtggttttttttttttttttttttagatggagtctcgctctgttgctcaggctggagtgcagtggtacaatcttggctcactgtgcagcctccgcctcctgggtacaagcaattctcctgtcttagcctcccgagtagctgggactacagacacacaccaccacacccagctaatttttgtatttttagtagaggtggggtttcaccacattggtcaggctggtcttgaactcctgacctcaggtgatccacctgccttggcttcccaaagtgctgggattacaggcgtgagtcacggtgcccagccgatagtgacttctataagcagtatatgtgtttactaatgtttaatagcataatactggaagagtgtttccacctcttaatatgtctctgtatttcttcccgagatggatctgtagatcactagcaagacaaaatcctcaccagatgttttatgcctcccttgagtgcaaattctatgaaaaaactgaaatagtgtaaggcagtaaaaataattctttaaatataaatactgcatattcttttatctggatttctgctaatctatttacaggtgttttaaaaagccacattttttgtgacaactcagggagttttccaccattctactttttaaccaagtttggcactacagggcagcacaaataagaagcatttgtatttttctttatgactgcatagcactgtgggttttcaaacaggaagacaaatattgaatttgaaattcactccttaccagctttttaatttcatatggcattctaataaattttttttataacttaaattttaaaaccttatgatgagaaagcaagttttttattaaatttacaaagacttcaacatctaaataatgggaataatagctgtacttcatgtttgaaattaaaccgagaaacaagaacctcaaatttgaatttaagtaattctcctaaacaaaacaaagacttcaattgttattgcttaccgccttctctttycttttctgtttaatcatattggaaagtactttagctcgagattgtccctctctgtccagcagataggcaggtactgctccctgtggtgtcttttcatcattcttttgtttggtgtttctcttttcatgcatcttgatactaccaagaaggaaaaaagattcaagattatctgttttaataatgattactcaaaagatgttaacttgttatgacaaataaatgagaccacttacgtctttttcatttgtattttctcagcatgacgctgtttatggtaaagcttagccttcagaccaatcattttytttgccttctttgaacgttcatgagcctctcgactttccttctttctctttttctcatggtaatccaaacggtatccatagcgtttacrgtgtaattcaatatattcattctgtggctataatgatggaagaaatattattttaattttttaaagtactgacaattattctaaaatgctttcttttacacagcacaaagaccctgtttcatccaaatgttcacttacttaaatgattcttgcaccattaagtttattcacatgatgtaagttaaattttggtcttgaatgatatgaggcatcagggcttacatctctaataatctcattagggaatggtccaaaatctactggaccacaaaagggatgaactgattacagtatcttttttccttgacataatttgcttttttaataacaccttcatttcacatttaaaaaatttaagtcagttttattgaagcataatttacacacagtaaaacctgtcctttttaggtatacagttctaagtttttcctaactacacagttctgtaaccaccacaatcaaaatacaaagaatttccatttccccctaaaattccctatgtaacttttaagtcaatcctctttcccaaccctcagtttgatacctatccctacagttttgcctttcccagaatgaaacagggatcaacagtagtacatagccttttgaatctggtttcttgcttttgggattcacccaatttgctgcaggtataggaacttcaatcctttttattgttgagtagtatgctattgtatggatacaccactgtttacccgctgaccagatgataggtatcagggttgttcccagttttgggtgattacgaataaatctgcaataaacaactgcatgcaagtcttcatgtggacgtgtgtttactgccagaccgttttccaaaagtgcattatttttcttttcaccagcaatgtatgggatgctttttgcattttagacacgttttaaacacgcggccaggcgtgagtctattcgtattttaaggctgcaaaaataaaaatgatacaaagccaagtccagcacagagagcaatgttaagtaacaaccaacaaggtgtgctgctaccaactgctatcacataaactttgcagcaatcacatgaagggtgtatggaatgccattttgcaaagaaacgcagattatagagacgtaacacaaagagaaaggacctggcagttagatctgggccgttaagcccggcttcgcaattcattagctgtctggtctttggcaaggacgccttcagtttcctcagcagtaaaatgaagggggcgggactgacatctaagactgtacaagggacaaccatattcccattaggctctggggctgataaccacgcttgtggtgaaatcaggaatttttaggactcttagcggtggatcaaaaagaaaaaagaaaacaggacagagtaaaatcttgctccaaagcttgtgttctggcaaataccgtctgtgtctcgaatgtgaagttgtttccactcctcagagcccaccccacgggtctaccatccttttctcttggcagttctcatttccgcctaccaccgctcaccccctaccccagcgccccagagtcctcaggtcccactaactcagacgctgtgtgtcgcgagcgtccgaggcatcctccttaccatggtgacggccgcagagccgccaggagcagccsctggagtgcgaaaacgctctcaattttcgggtctcaaagacccacaagcccacaccacgcaggccgggacaggaaagagtcaccytttaaaacggccgagtgaagagcaagaaccacgcagcggttccgagcctctgttttccgcttttagctaggaggacggaagttgctggcaggcggcatttggccggtacaccgccggaagtgtggaggtgtggctgcccgaggcggtagagcggagaaagcctattttcttttcgtttagatacattrccttttgcctaggctggcgtcgagacttgaggccgttgcagactttggsgcggctcgcgcctcctgcttcaagagcccagcggtgagagctggcctgcggcacgcggcctaatgccaggtgagtactgctccgagctgtgagacatcgcgcscctgtgaccctgtcacagcgctgggtaccgctgacctttcaggctgcgacggacacagccagccacggaagaggacaacagggcctccggactcccctcggtgttcgctcagtatggaagtttttctctatcattcggcgaagtcgactcatctttgttccggtcactctgtgtaatgtgtgcatgattgtgaaggatactgaggaatgaaaacttagtgtacagaaaaatggaactactggggctttgcagctgttagaaaagaagaagataacattctggttttttggaggtacaggactgattccagaaatttctgaggcattttggtgcaccgaatcaaatgctgagtggacttgtatttagtggccccctagtgtcaagaagtaattaactaccagaaagtacgtctacttaaatacactatcaggtttacccttttactgcacagttgcagaagttcccttaattacttcacagcttgcagcgtgattcagttgatgaacaaaaagaactgtaccaaaagaatactttcattaattcttagtgcttgtatttgaggcagtattttgtttttgtttttgtttttatgggtattttgagacggcatctcgcccagtcgcccaggctggagtgcaggggcacgagctcggctcaccgcagcctcgacctcccgggatcaagcgatcctccgacctcagcctcaaaagtagcgagctacaggctcgcgccacgaagcctggctgatttttgtagtttttgtagagatgaggtttcaccgtgttgcccaggctggtctcgaactcccgggtacgagcgatccacccgcctcggcctcccaaagtgttgggattacaggcttgagccacagcgcccggctttgaggcagtttttgttttgttttgagacggagtttcaatcttgtcgcacaggctggagtgcaaatgcgccatctcgtctcactgcaacctctgcctcccgggttcaagcgattctccaggttcagcctcccaagtagctggaattataggcgctcgccaccacacccagctaatatttttgtatttttagtagagatggggtttcaccatgttggtcgggctggtttcgaactcctgacttcaggtgatccacctgcctcggcctcccaaagtgctggaattacaggcgtgagccaccgagccccgcctttgaagcagttttttaaggctccattttctaaggtgatctcatcattctctttaaaaccagaaatagtaactagcatttgtatattttaggtacagtacgttatataatctctttgcctttaatgcgcccctccccgccgtccctcaatcccccgaatttcctccctcatctacttcaggtctttgcttaaatgtcactgtttgaatgaggccttccttgatctctttacttacagttctaactgtcccaattcctccttcctgcttcattcttctctacagcaccctatcatcatgggagagactatgtattgtattcgttacttttgtttgttgtctgtatcccctgactacggtagaggcagtatgagggcagagattgttgtcttttgttcactgcattaacgctgatatctagaaagcagtgggtaggcagacacacagtaaattcttgttgaataaatgggaacgaataggcttgggcgggggagggctgggttgtgcaaattatctttttattgacaaccactgagttaaagaagaggaaaatgtctattacagtcacaactgtggagagactatgaggccctgaactttggcgttaccaatgaaaagggaatggattcaaggccaggcatggtggctcacgcctgtaatcccagcactttgggaggccgaggtgggtagatcacttgaggtcaggagttcacgaccagtctggctaacatggcgaaaccccgtctctactaaaaatacaaaaagtagccaagtgtggtggcacatgcctgtagttccagctactcgggaggctgaggcaggagaatcgcttgaacccaggaggcagaggttgcagggagctgagatcaagccactgcactccaggcttggtgacagggcaagaccctgtctcaaaaaaaaaaaaaaaaaaaaaaaaacaacaaagggaacagattcaaatatatttaggaaatcaaatgtaagtattagatgactttctaaataagagtagtgaatgtttcttagctaagatccagaaagaacagacttaggagtagtaatgaggtttcacatatcttaataacatggatcacaatggtttaacacaggggtgtctaatcttttggtttccctgggccacactggaagaattgtctttggccacacataaaatcactaatgataactaacaatagctgatgagctaaaaaaaaatwaaaaaaacctcataatattttaagaaagtttacgaatttatgttgggctgcatataaagatatcgtgggccgcatgtggcctgcaggccacgggttggacaagcttggtttaacatggtctgtctgtctccccagcatccccagtctcagctgcgtccttatatttctaatagctttgatattgtacttgaaacatagtgaatatttagcaaatgtttttaaactaaagatgcttagtttctataatcagagaggaagaggacttgcttttatatattttttacatgatttagtttttacatggtatggtaggaaaatcagagtatacaaatgaatcaataaattttactgccaattagaaattaccaagttaatatgtggatgcttagctttttatgcttaattctatacatttacataacaatgcattttggttgatacaatgttttgtaatttcaataagttgatttctactgtatcgccatatctttctttaaacattacattgacaaataagggacattttaaacctaaaaaccatatttctcatatttaatcagaattttccattttctgaatgatgcattgaatttttggtagctaaaaatattgttccaactttttaaaagtaatacattttaccatacatattacatatgtctaacttacatatgccttgctgacatgtaatacataagtttagttttttgattttgtatatttattttttcagacagtaacagtttggaggatcaagatgttgaccaacttgaggatatttgcaatgagtcatcagacaatacccagtgtgtatattaatgtaagcatttcttataaaattaagtgtcctttaacaacctcagctcctttactgcctaaaatgcccagtatatctcatcagctgttgattccaaatttagttgagtcataacctttggaaatcttcaagctaaactaatttgaaagtaattaccttaatttattaagaaatataagaggaaattaccttaatttaaaagtaaaagaacagctgtagctaaatactggtctcatggagtactaaaatgccagttgtttttgaaggaggggtagggttttatatctaagaatgtcatcacttaatgcacatctttaaactactaacaaataatgtgctttgtaatattaagtatccatggattgagactcttatgaaataaagtttctgttaatatcaaagtacaacataattatrcaatggttgatacaactacttttggctgtcttctgcagagctgttggaagccagcttcttcggcagtctgatatttgtctcaggaacattgttttagtctttagctctggtctgactcctgaatcctcttcaaaacactataaattattttctaaactatcacatcttcagtatacttaaagatattaaatctcaaacataataataccctttttatctatagctaagtgagagattactttaaagcttgtttgggttgtttctttttatcttcagtgacttaacagggagtacaatagtttccccttattcatggttttgctgtttagctgtttcagttgctcagagtcaactgtggtctgaaaattaaatgggaaattccagaaataattcataagttttaaattgtgtgccattctgagtactgtgatgaaatctcatgccatcccacttaatcccacctgggaggtgagtcattcctttgcccagcatatccacattgtatacactccccacccatgagtcagtagccatctgggttatcagattcactgttgtgatactgcagtgcttgtgttcaagtaacctttattttacttaatcacggtcccagagcgcaagagtagtgatgctggcaatttggatgtgccaaagagaagccataaagtgctccctttaagtgaaaaggtgaaaattcttggcttaataaggaaaaaaacaaatcatatgctgaggttgctaagatctatggtaggaatgaatcttctatccatgaaattgtgaagaaagaaaaagacatttttgctagttttactgttgcacttcaaactacaaaaattatggtcacataacatgataagagctcagttaagatggaaaaggtattcagtttgtgggcagaagacatgaacagaaccatgttctgattgatagtaattaggttctgtactatctgaggtttcaggaatccactgggggtcttggaatataacccctgtggatagggtrtgactgctgtatgggagaacctgtaacccttaagaagccttaccattcgtctacagtttttttgttgttgttgctaagaagccttaccattcatctacaatttttttttgctactttaaaaatcacctgagcagcattttgaagaagatatatttctgtattccatttgtgatctcattaagtggcccaaggagttacccagtttttcttcagtgcttttattgctgacgctttcagactatgcacgctgtgatagacactgggtcttatcctagtcattatgcagtggaattattttctgaggatagtagcttattattgccagaaacttggtaactaatgtagaaataatatagatcgcacagatacgcagttcatgaaacaaaaagcagattgtggtggccctaaatcattacatacactaacaattccaactacattggcagctattaaatgtatatctagtggtctgggcataaactgaggtggagaatattcagcctttacatgagaacatgagaaggttaggtaagcagctaaggtagaggaggtaggcttggccttaagcagacctgctctaactcagtgattctcagttgaatgctacattggagacaccctgggaattttttttaaatgccactgcccagttcctccagttctcattttctctccccacccccgtgtcttcaagaagctttccagatgattctaatgtgtaactgtaataaatcctgaaaacaactaatggttttagagttcattgccccctacagacctttcagcagatgtagaggaaaaccaaggtgtatcctgggtgagataccttatttaacctttctgactcagcttctgactttcagaactttagggttgtggttctcaatctgtagctattagaatcaactggagagctagtttaaacagattgtttggctccatccccaagagtttctgattctcttgtctggattggagcctaagcatgtttttcaaacaagccctcagcccatgctaatgctgcaggttgaggaaaaccattgttttaaggtcagctcaaaatagcaaatcagtattaattttatccttattctttcccctaggatatatttggattgtcactttttaaaagaattggagttaataaattaggactactttaaagctatacaaaatattttatcttctgacaaagcgtaattacaatattaacactgtaataagtgatgctaaaataaaattaatgccaagtttctttttctctttactagaatatatgctgctataaaataagagcaagtttaaaaagattaaagccacatgtgccgcttggaagaaattgcagttctctaccaggtacaaatgttagagtcttctaattttatctaagctgtttgctttatctcttttctctctcttgtttgcaagaatctcccttattagggctctgtaaccattttttacttcttggctatttccttgagattattaggggcgggagtgttcagataggtgccagaaggaaatactagtagagttgtgctccttatctgaggaacacgctgatgaactgagcaaaggaaaggttggtggctttagtagctagtttgcaagtttaacatgtgagtgtaattgtagagtgctcttgtgaatttctttttctagtttatttctgttttttatgcaagtgttttctgtcaagagagatttactagaataatttattttgaggattgttataagtagtttggctaagtatttgggattgtttaggttagatacatggcatcagaagctggaaggtggaggagttgacttacttttgaatgtcctttctgtgtttgaaacaagcaagtgtatggtagactctatgaaactagtttaattctgttgctgttctcattactgtgtttgtcatgtgagaataatagaataaaaatactgattggctgttgacttacaagggcagattaatttaatgggctacgttattggtgtgtatctaggtctctgaatttggctaatatgaatttaactgtagtagtatagattatcttttgatcttcaaaccaccatgaagtttcaaaaataatataaaattctcctttttgtattatagaaacatgggagaaatggtttaaataacaggaaggctttaattaaatttacaaatgtaactgccttgtttctttagaaattacttcttaatattagtaaactatatattaagcatagaataagccatatggacttttttatttaagaaatactgcttggcctttcaaaagtattaaattgttatagcttctattcagtgaaacctcccaggcagtctttaaaggtattgtgtcctgggattgctgaggaaggcaagttccaaattgtataataattcattatcagctgacatgaggatcactcttagctcttcaaaccctggaaaaggcaggtttataggactgtgcatttaaaattttttctttgattcaggatcattgccttaagattattattatgagcatttattctagttctacaattttgtaaatggaagtgaagtaggtggcagagattggggtgaatctgtatttttctgaggatatgatctagaacttgatgtttaaaacttttaccttgttttattgtcatccatagctttccttatacattgcaaggaaataaattttagtttattttagatttatttagcttgaattttactttatttggacttacagtatttgcttaaagttattttaaagtctttcatttataaattaaaggaaaatttcataaatgtaacagttcaattttaactttcttttcattaggcttaataggaaatgatatcaaatcccttcattccatcatcartcctcccatagctaagtaagtactatcattatatcatgcttttccatagactgtcacgaaaatttacaggttttttctgatggacaagagtgaatgctgtaatttctatgactttctgccctagccaattttaagtagatgttgataatgtatcttagctattttttctcaattaatgctaaaaatttttaatgtaacaacagcacacttttctagaatgaatataagatagtctcaaaattgtaggttgtagttagcccttttgttacttagctatcttatcagagtaatgtggatatactctaaatgttttccatttttctagtttttacacagttttataaattatagaaataccagctttgaaatttggatagcatatatactttggttttacaattttagtaaagtttaccttattttttccttttaaacagaatccgtaatattggaattatggctcatattgatgcaggcaaaactaccaccacagaaagaatattgtactattccggatatacaagatcactgggaggttagaatggattcctcctcttcccacccccccattagcaaaagcatcattggaaaatattttggttaacaagtcaacytacacaccttgaatatggcatagagctactgatgtctaatccacaatttaaagataagatagttgcaatacccaccaaagggtcttcttagattcaactaaatattcagacttgtaagactatcataggccccactggacactcgtctactcagaatgctacaggacaggaaccacagcttaccaacagaccagcattaggtgtttctttctagtagagtccttatagcagtccccgtagctatctgggagctatcttctttggctgctccagagtaatggattagatgcaaggtgacaagattcataggagccaccctagcttagaagattcatgccccataggaatgaatgtctcttgttataacttcataggcatagcttccaggtgtcacctaaggtacatgccatacacagggaagcccagagttcggtatctccataaggtacttatatatataattcatttatagttcttcgcaattcagatttagtttaccaatcagaagttgttttttccataagttatattgcctaggaatgtagttgacatacctctgttatctggtttctagaagaaaagaaccaaaaaaagtaaccagaagttaaattctcacatcaaagaggattttgttaatccttaaccaagttatcttttgtcttttaaattgtagttaaaaaaacataaaatttaccatcttaactatttctaagtgttaactattttggtagtgttaagtatattcacattattgtgcaaccaatcttcaaaacattttcatctttcaaaattgaaattctatacccattaaacaactcccattttcccctttccccggtcccttgcaaccatccttctactttttcttcatgactttgactactctaggtacctcatataaatggaatcgtaagtatttgtctttctatgactggtttatttcacatagtacagtgtcctcaaggttcatccatgttgtagcatgtgtcaagattcctttttaattttttaattttttttttttttttttttttttttagagacataggctcttgctctgttgcccaggctggagtgcagtggcccagtcacagctcactgcagccttgaactcttgggcacaagagatcctcctgcctcagcttcctgagtagctgggactacaggcaggtgccaccacacttggctaacttttgtatttttggtagagacagggcctcagtgtgttgctcaggctggtctcaaactgggctcaagtgaagattccttttataaggctgaataatattccatgtgtttttatttatttatttcaaactaatgcagtttattataacaagaaggaaatcaagctttacagtaattatagtcactaagctgaaaaatcacctacaaaagtcatggcaataacttatttacagttaaaaaagagaatatcaagatcttgctctcatagtaaggtaaactagacatgtacacaatcttatgatgccaagaaactgaatatataaaaatagaacccacatagaatgttctctctctcttttatatacacacacatttgctctgtgattgcccttaattttatgtctttatcataactggtttattatatttataattaaagataatcttagactttatattctaaaaagcaactaggttaacagttttctcccctaaggcttattttattttattttttatttcaataggcttttggagaacaggtggttggttacataagttctttaggggtggtttctgagattttggtgcacccattacccaagtagtgtacactgtacccaatgtgtagtcttttatccctcactcccctcctgccctttctcctgagtccccaaagttcattgtatcactctaatgcctttgcatcctcatagcttagatcccacttatgagtgagaacaaatgatgtcagttttccattcctgagttactacacttagaatcctggcctccaattccatccgagaatagtggtctccagttccatccaggttgctgcgaatgccattatttcgttcttttttatgactgagtagtattccatggtgtgtatatgtgtgtgtatatatatatacacacacactttacactgttagtgggaatgtaagctagtacaaccactgtgcaaaacaatgtggagattcctttaaaaactaaaagtagaactaccatttgatccagcaatcccactatttggtatctacccagaggaaaagaaataattatacgaaaaagatacttgaccacgcatgtttataacatcacaattcgcaaaaatatggaaccagcccaaatgccaatcaatgagtggataaagaaaatgtggtgtatatgtccactccacatccactccaacatctgttattttttgattgtggccattcttgcaggagtaaggtggtattgcattgtgcttttgatgtgcattttcaaagaaaatgtggtgtgcatgtatgtgtatatgtatgtatatacacatatatgtataatgttggctgtgggtttgtcatagttagctttcattactttaaggtatgtcccttctatgccaattttgaggagggttttaatcatagagggatgctgaattttgtcaaatgctttttctgagtctattgagatgatcatgtgatttttgtttttaattctgtttatgtgatatatcacatttattgacttgcagatgttaaactatccctgcattcctggtatgaaacctacttgatcatggtggattatctttttggtatgctgttggattcagttagctagtattttgttgaggatttttgcttctgtgttcattagggatattggtctgtagttttcctttttttgttgtgtcttttcctgcttttggtattacggtgatactggcttcatagaatgatttagggaggattccctctatctgtagaatagcatcaatagaattggtgccaattctttgaatgtctgatggaattcagctgcaaatccatctggtcctagactttttttgttggcaacttgttaattaccatttccttctcactgttatttgtctgttcagtttctgtttcttcctggtttaatctaggaggattgcatatttccaggaatttatccatctcctctaggttttctagtttatgcgcgtaaaggtgttcatagtagctttgagtgatcttttgtatttctgtggtatcagttatagtatctcctgttttgtttctaattgagcttatttggatattttctgttcttggttaatcttactaatggtctatcaattttatttatcttttcaaagaaccagctttttgtttcactttttaaatttccatcttgatatcattgttgacccaatgatctttcaggagcaggttatttaatttccatgtatttgcatgattttgagggttccttttggagttgatttccagttttattccactatgatatgagagagtacttgatataattttgattttcttaactttattgagacttgttttgtagcctgtcttgtggtctatctgggagaatgttctacatgctgatgtatagaatatatattcttcagtttttgggaagaatgttctgtaaatatttattaagtctttttgttctaggatatagtttaaatccattgtctcttttttgagatggagtctggctgtgtcgtctagcctggagtgaaatggtgcaatcttggctcattgcaacctccacctcccgggttcaagcaattcccctacctcagcctcccaagtagctgggattataggtgcccaccatcatgcccggctaatttttgtatttttatgttggccaggctggtcttgaactcctgacctcaggtaatccgcctgcctcagccttccaaagtgctgggatgacatgcatgagccactgcgcctggccagtccattgtttctttgttgaccttttgtcttgatgacctgtctagtgctgtcagtagagtattaaagtcccccactattattgtgttgctatctcatttcttaggtctagtagtaattattttataaatttgggagctgcaatgttatgtgcatatatatttaggattgcgatattttcctgttcgactagtctttttatcattgtataatatccctctttgtcttttttaactgctgcttctttaaagattgttttgtctgatataagaacagttattcctgctcacttttggtgtccgttagcatggggtatctttttcccccctttaccttaagtttatktgagtctttatgtgttaggtgagtctcttgaagacagcaggtacttggtgaactcttatccattctaccattctttatcttttaagtggaacatttaggtcatttmcattcaatgttagtattcagatgtgaggtactattgtcactatctattgcctgaataccttgttttttttttttttttcattgtattattgttttataggtcctgtgagatttatgctttaaggaggttctattttggtgtattttgaggatttgtttcaggatttagagctgcttttagtagttcttgtagtgctggcttgctagtggtgagttctctcagcatttgattgtctgaaaaagactatatctttccttcatttatgaagcttagtttctctggatacaaaattcttggttgataattgttttgtttaaggaggctaaagtaggacccaaattcctactagctggtagggtttctgctaagaagtctgctgttaatctgataggtttttatttataggttacctgatgttttttccccacactcttaaaattgtttcctgtcttgactttagataacctgatgactctgtgcctaaacgatgatctttttgtgatgaatttcccaggtgttctttgagcttctggtatttggatgtctagatctctagcaaggccagggaagttttccttgattatttccttaaaaacattttccagacttttagatttctcttctttcttgggaatgccagttattcttaggtttgctcatttcacataatcccaaacttcttagaggctttgttcatttttttaaaattcttttttctttgtgtttgtcaggttgggttaattcaaaagccttgtctttgaactctgaagttgtttcttctctttttgagatggagtcttgctctgtcacccaggctaaggtgcagtggtacaatctcggctcactgcaacctccacctcccaggttcaagcaattctcccacctcagcctcttgagtagctgggattatagacacacaccatcatgcttgactaatttttgtatttttgtagagacaaggtttcaccatgttggccatgctggtcttgaactcctgaccgcaagtgatctgcctgcctcagcctcccaaagtgctgggattacaggtgtgagccaccacacctggcctttgaagttgtttcttctacttacttaattctattgctgagactttccagtgtattttgcatttgtctaagtgtgtccttcatttccagaagttgtgattgtttatttatgctggctgtttctctggagatttttccgttcatatcctgtaatatttaaacagtttttttaagttggtattcacctttctctggtgcctccttgagtagcttaataattgaccttctgaactcttttttctggcaatttagattttgtcttggtttggattcattgctggtgagctagtgtgatttttggtgggggggattaaagaaccttgttttgttatgttaccagaattgtttttctggttccttctcatttgggtagaccatgtcagagtgaagatctggcacttaagggctactgttcagattcttttgtttcacggggtgctcccttgatgtggggctctcctccttcccctaaggatggggctttctgagtgcaaaactgcagtgattgtccatgtgtttttgtacggctatcttttgaagttcttttctagttcagaccatagcctaaaaactatccaggttgttgtagaacttgctgatccaaggttgactttattagtcatatgaataatcataaagataatgtgaaataaagatctttataattgtgaaaatgcttactactgtgtaagtgtttttaaaacttactgtctcatttagaacttatagttagttatttggtctgtatccttaatgatactattttctttggcagtgatgttgggaataactgacactaatacaattatagatattaacatagagttatatttgagttgctgtcaaatacatttttcttgctatttcctcctctggtgtttagactatgtgtgtgtatacatatttatacatatgcacatacacatacacatatatggggcaactagctaccattttaggggtttaatgctgaaataaatggtagtataaggccatgataatggtaaagaccaactgtttatttcttttactgtctataaatttaattagaataatatgcttaattcaactacagaattttactgcacaataatttcagtgaactttttggataaagttcaggatagtttttttgtgactttatactgtagaagttgtatgagactacttgcacttgtacaactaaatcccttctctttggaaaatttagtaatgagatgggtttgtaaaggataatttaatattggatgaatttttttctctacctcattccgtgtggctatcatttatcatctactagactaggtactttatatatattgtctcctttcatccttataataacaacccagcaaggatggctttactagccttattttacaaactaggttaagtagtttgcctcaagatcatagagtgctaagtggtaaagttgggatttaaagctatgtctgtctgtgttctttcactgtaccactcggcctcctatcaagggatcaggagggagggacatcagataaaaagggggtaatgatagttaagctatgtaagaaataaaagaagtaagtaagtaaaataagttcagtaaacttaaaagattttcatcttgatgaaaaattccttttatggcaaagttactaatctagctgaaaaactttttctaccatgaggatttacttagtgaaagagtaaaggctctattaaaycaaatattttaggaaagatttttcttaaggcaggttaaactgtgtcaggtagatattgagcacgaataaaatacacttgctattaagactaaactgtatcatctttttcctggctagatgttgatgatggagacacagtgacagatttcatggcccaagagcgagaaagaggcattactattcaatcagctgctgttacatttgattggaaaggttatagagtcaatctaattgatacaccaggtatggtacgattccagtaacacagagatgctgcgtcatttggagtttttttgtttttctggggtttttgttttgctttttattgtggtaaaaaaacatgtgttgcaaaatttaccatctcaaccatttttaagtgtacagtttagtagtgttaagtataatcacattgctgtgaaacagatgtccagaacttttttatcttgcagaaatgaaactatattcattggacaacaattcccttttgccccctcccttcacccctgctaaccactgtgtactttgtatacctatgtatttgactagcttagatgccttatgtaagtggaatcataccgtatttgtcctcttgtgattggcttatctcattagcataaagccctcaaattttctcatattgtagcatgtgacaatgtgctacaatattttcttttttattctgtgtagtattccattgtatgtgtatatcacattttgtttatccattcatacatcagtggacatttgggttttttccaccttttgtctaccagtgctgctatggagggtgtgcaaatagctctgagactctgctttcaatacctttatatatatacacatatatatacacacacacccctccccaggagtgagatgtgagattgctggatcatatgatggttttgttaaaaagaaggcattatacgtcttatctttttcttaggtcatgtggactttaccttggaggttgagcggtgcctaagagtgttggatggtgcagtggctgtatttgatgcctctgctggtgtagaggtaaataatattgccaaagtaaagggaattagaacagcatgattttttaaaaagtagaatatgtcaaatttagttaactgtaaccatctatttggtaagttcacataaatcaaataatggtaaaaggaaatcagaatttatattgagatgtaatctacatgtaatctcagatatttcataktaaaaggagaaataggaaagctggtgtcaagaactttgagagatcagagattctaccttacttttgagctaacaagttagcctgccatagtttaatggattctggcagaagacactgtggtgtgagattgattatacactgttatttctgtttctttctgggtcactttatttcctaatagttccatttttctgttgttgtaactttagataaatttgacgtttaatcattcaaacagattgcattacttacaagattgaaatgtgcttgaataggaagttgctgaattcatgaaggagaaggcacttgttttaaacaatgaatgagcttttagctggcaggtggaatggtgggagttttttgttttgatttgcaatatgtttttgttctttgaaaatttatgatattcaccctccacgcctcacacacatacctcatcatacacaaaaattaatttggagtggatcacagtgttaagttatgtatacatagcttctagaagaaaaatatctttacagccttggggtaggtaaaaatttcttagaggacataagaagcatgaaacataaataacaaaagttgattcctggaactttatcaaaactacagctgttcattaaaacaaaaaaattaaaaacacaaggaatagactatgagaagatacttgtaatgttagataaacatattatacaaatattaaatttcctgaatgcaataatagtattggttatataagagaatatgattgttcttgggaaataaatactgaagtatttatagtacgtatctataaccatggatttgtatccagactatatgaagaaccataaatcaataataacccagaagaaaatggacaaaaaacttgaatggacacttcacaaaagaacacatgtgaatgaatagtaagcacatgaaaagatgtataatctcattagtcctcaggaaaatgcaaattaaaatcacagattcaatttcacacccaaaagaatgcttataattaaaaagagtgatagcaaatgttggtgaggatgtggagcaactagaaatcttacacattgttgataagactgcaaaatagaggccaggcatggtggctcacacctgtaatcccagcactttgggaggctgaggcaggtgggttcgcttgagcccaggaattagagaccagcctgagcaacatggcgaaaccccatctttataaaatacaaaaaaaattagctgggtgtggtggcgtgcacttgtcatcccagctactccagaggctgagatgggagaattgcttgagcccagcagggaggttggggctgcagtgagccttgattgcaccactgcattccagcctgggcaacagagtgagaccctgtctcaaaaaaaattaaaaagactgcaaaataatgcaactactttggaagactatttggaagtttctttattttattttattttattttattttttattttttttatttttttttwtttttttattttattttattttatttattttattttattttattttattttgagacaggagtctcactctgtcgcccaggctggaatgcagtggtgcaatcttggctcactgtaacctctgtctcccgggttyaagcgatccttgtgcctcagcttcccgagtatctgggactacaggcgtgcaccaccacgcctggctaatttttgtatttttagtagagacagagtttcaccatgttggccaggctggtcttgaacttctgacctcaagtgatccacctgcctcagcctcccacagtgctgggattacaggcgtgagccaccgcactggtggataggaaagccaactggtacgtatgtataattaaaaagaacggaaatacctaacaatgtggatgaatgttaaaaacatgttgagccaaagaagccatgctattttgtatgaggttcaagaataagacactgaagctatggtgacagaaatcaagacaggttgcttataggagacagggatgagaaaaatttcaggagtaacagaatgttctatgttctaagtggggtagtagttacacaaacgtacttttatcaaaacgcattgagctatacacttaatatctgtactttattgtatataaattttacctaaaaaataaactggctgctttatagtacactcctatatttcttttacctcaaaataagtgtctgaaataattaaggcaaaattcctatttcatagatcagaaacctgacattaaatgagttcagtgtcatatgacatttactaggaaaagtgaagccaaacaaraagtaggtctcctgattctcagttaagttcactttccatgattctcagtacctcctgaggtgttaattctctttgtgtggccacctagttcacccagagtattctcaagtggtttgaagcacactccccttcacacttcatcacgttcccggctgtgttaacttgatagctaaagagtgaccctaaaaatataagtgcagttgcactaattctctgctagaatagggcccaatttatctgacagtagatttttggatctcttcattccaggtctagtaacatagttacttttgttsagtatgtatttttttcctcatctttgctttaggcccagactctcacagtatggaggcaagctgataaacacaatatacctcgaatctgttttttaaacaagatggacaaaactggagcaaggtatttgaaatgtgtttcattggcttatcagggtgaaactacaatttgagcttttaatgaactataacttaaatttaggaatagctattttttttcctattgtattatagggtataaatattccatggaatcccagtttattcccataaaaaaattcaaagcagctaatccataggttatataacaatttgggagtaatagctgatagatggtgaatcatcctgtttctagtatagagagactgaatcatatttctgagatcaaagtggcttcttgatgattccattgattctctttagaacacaggtatagtccctatattgctgaaggtatggcgcttcccatcatcgctaaagatagagaatagagaactgtttcctgcatttgaaggtgttcttccatattctctgattttcttagctactgggtaagatactgtcaataaagaactggaagaagagaatgtagatgstgtaagacctgcatgtaggggcagaagagagttaatgctgagatgtattggtcatggtcagagacttacagagtggtggatgcattgtcctgggaatataattcagataatcaagaatatttgaaagatttggagaaaatgtgaaagggagagaatcaagaatattaaaaattctagaacaaatgtgatagggagagattgtggcctgtgatgggagaatggcaaaaatgaaacataaactatacctcccctaaaactrcacagtaattaatatgctttgtgtttatctccctctctatagtaattctgaggctgtttgtttaaagaaccttgtcttgattattaatagcccagcaacctttaaaatgtactagcctcaagttctgacccttttctgcttggagttcctgtggtagatggaagtacttatttattgtcaggcagtgccattggcaatggggagggatatgactggaaaataggctggttctgaaaaacaatgggaccggaatgacctgcatgtaaatcagcttgtgtgccaaagatggcatgtgttctataggtagccagctgcagtgttagcatagaaatgaatagcgtagcatacgatgtgaagaatgccaaagactaggcaggctcttggaagaaagctagttgccttgtatggtagtaaacctagttgtagaagaaagaatccttggcttatcacaaatcttgcattggaatcccaactgcactttattatccttgttaccttgatcaattcatttaatgttaattgcaaagtatagttatgcgaagctcacaataataatamcctaaacagctctgtggctggattagggtaattactgatatctgaaattgacataaaagtttattccagacattttcctatggaaaactgttaaatagtgagcgttaaggagaataaagtgagttaaaattttagaaaacattcttaaaacctgaaagagttttttttcctctcttgatacctttggtaaagaatttttaaccatgtttttaactataattattttgctttctacagctttaagtatgcagttgaaagcatcagagagaagttaaaggcaaagcctttgcttttacaggtaaattggttaatagcatcagcttcttctcagtttcctcattaatttattttgtgacaatatatacatttccaaagctatctcatcatttttgaagaagttggggtataaatagaaatagccacagattatagtaatggtgataatagacattttggggaaaatggtacaattagaaaagacttgtcatcattgtagttttcagtgagtgatcatgtaataatgttaatctcactctgacttacagttaccaattggtgaagccaaaactttcaaaggagtggtggatgtagtaatgaaagaaaaacttctttggaattgcaattcaaatgatggaaaagactttgagagaaagcccctcttggaaatgaatgatcctgaattgctgaaggaaacaactgaagcaaggaatgccttaattgaacaagtaaagtataatgaatgataaaatgaacaccaatgtgtgcaccacttatcttaaaatatagtcatactttagcatctctcggggattggttgcaggacctcctgtggataccaaaatctgcagatgctcaagtccctgatataaaatgatgtagtatttgcatataacctattsatgtcttcctctatactttaaatcatttctaaattacttataatacctaatacaatgtaaatgctatgtgccattttttgttcatctctctctcccactaatcatctacctgtcccccaaattattatttcaatatttctctttcatttgcttttcgttgagatggagtcttgctctgcggcctaggctggagtgcagtggcacaatctcagctcactgcagcctctacctcccaggttccagtgattctcctgcctcagcctcctgggtagctgggattacaggcacgcaccaccactccaagctaatttttttatttttattttttggtagagatggggtttcatcatgttggccaggctggtctcgaacccctgacctcaggtgatcgcccacctcagcgtcccaaagtgctaggattaccagcgtgagccactgcgccgggcctcatttgcttttctttagtttaccataaatccttaaagaacttaggtttacatgttttgaactttacataaatgaaatgttactgtttgtattttatgacattgctcaacattgttggaactttatccatgttgcaaatatgtgtagttataatctattcatttcaatcttgtatattgttataatatatgattttaccacactttattgggtattctcctgtggatgggctttgaggttgtttctcttttttgctgttacaaacaatgtggctatgaacatttttgtatctacttgtgcacatgggcaatagtttctttaggattaaactaaggagtagcattgttaggtcaaaggatatgcatgtcttttactttacttttcaccagatgtcaaattatttagaaaattttaaaaccatcaattttatagttggtatatagctctgggcctcatccaccttcaaaattataatcttcaaaatagcaagattgttaatatttgtaattttatattatattgttagtatatatggcaataaataaaacataccttaatttcttgaatattatggtagagaaaaacgtttgaatcagagcccttgatttttcacttctaaattgaattggtccaaataaatttattcagcattcatttttttttcacttatcttttgtacatagtttttttttttaagtatagtcatgtacttcatgatgacattttagtcaacaacagaccacatgaatgttgacagtgccataagattataatactatatttttcctgtaccttttctatgttgagatacacaaatacttaccattgtgttacagttgcctacagtattcagtacagtaacatgctgtatggatttgtagcctaggagtaataggccatagccttggtgtaaaagcaggctatgccgtctaggtttatgtaagtacactctatgatgttggtagaatgacgaaatcacctaacaccacatttctcagaacttatccctgtcactaactgattcctgactgtatgtagtaatcattgcaactttatcattaacataataattgttatttttgttattgagttaatgagggcctactgtgtgctaggttaagtgctttacatatactttttaattaaaccctcacaagaaccttatattgtccctattttacagatggggaaacagcagctcaaatgcttaaataagttgtcacacagctaataaagtggctgagctagaatctgaacccaggttaatctgtttagagctaaagctcttacccgctttgttatactgcttttttaatttggggagcatagaagatataaaagtggaattgacgtttattaataattcattcctctttgagtttgtttgtgttgttttaatacagaagagctataagaataaacttaagaaggatcttgtaatctagttgaggagccaacacacacttgcccatgtctcatggtcttctaggatgtgatagtatgtgacagaaatctcagaaagaatctgagactgtcagtagctaataatatgctaattataagaaatacataagtatgtataaaatttacagaataagactacttcacacccattagggtgcctactgtcaaatacagaaaataggtgttggcaaaggtgtggagaattataactttgcgcactgttggtaggaatgtaaatgttgcggccactatggaaaacaatatggckattcctcaaaaaattaaatatggagttactatattacccaacagttccactttttgggtatatactcaaaagaattgaaaagagtctcaaagagatatttgcacacacatgttcttagcagcattcttcacaatagccaaaaggtagaagcaacccaaatccatggatccagagtaatcagattcagagacagaaagtagaatggcagttgccatgggctggggaagggcagagagaatagagtgttgtttaattaatgtatatggagtttgttttgcaagttgaaaagagttctggagatttattgtgcaataatgtgaaagtacttaacactactgaactgtgcaagagtacagtgggctgggtgtggtggctcatgcctgtaatcccagcactttgggaggctgaggtgggcagatcacgaggtcaggagtttgagaccagcgtgaccaacatggtgaaaccctgtctctactaaaaatacaaaaaaattagctgggcgtggtggcacgcgcctgtaatcctagctactcaggaggctgaagcaggagaatcgcttgaacccaggaagcagaggttgcagtgagctgagatcgcaccattgcactccagcctaggtgacagagccagactccgtatcaaaaaaaaaaaagagtacaatggtaaactttatgttgtgtatattttgcgataatttaaaattttcctttaaattagtggataagattagtgtggaatagaatcaacttccaatattgaaggtgcacagtaataatagctaatacttattatacactagtatatattcttaaagcataatttgaattatttaatctttataacagcctcaagaagtagatactactatcatctttgtgagttactaaggcagagaggtgaaataacttgaccaaaatttgaacaagtgggtaagtggtggaaccatttctaggtagtctgattccagaagctgagcttaaccatcacatataatgctttccagaaggatggttaggtacatttctgctatacttaatcctgttaacagtgtggttttttttttttttaccaagtttgaacgttttgctcccttgtactgttatatgcttttgaagctgttttattaatttgtcagctgaatgatcccatttcgtatagtcggatggtcatgaaaagaatgtgaaatagacaattgcatttttattattgaaatattgcctacgcctcccttccctaacataaatgtatttcttcagtgcgggattacagcaacattaattctcttagtttgactgtcttgggagatctggtgaacattcagaatattagaggaaaaccagatgaaacttttttataaactaaaacctccagatttatctaagaaaggccaatccattgtatgtgctatcattgtaagttgcacattttctttgatttcttttgagcacactgatagcatttaattaagatgctttatcaggatctggctttctgtgaatttaggaaactcctaatagtatctttagttttccatttcttttcctttcaaagaaaaacatttttctttatctctttagaagaagtgaagagttgcttggcctaggtaaggtagctgtcttgaaatatttgaatattgtctgttkayggtgtttggacaaattaatagttaatgaaagtaaatgcaagttatagaactctaaaacctttctttataggttgcagatttggatgatgaatttgctgacttggttttagaagaatttwgtgagaattttgatttrttaccagctgaaaaggtaaattttattattcaatggctttcacaaaattttactaattggatgtagtttgatttctctgcctttgatgtgtgtgcattttttttttaaactttgcatattattagaaagtggtaagtttaaagttaggagaacattaagttaaagtcactactaatacaatacttattggcagtgatttattactttcatatatactttacaaaattaaaaattgaatctgtttaacttctattgagtctgcatcagttaactactcattctctgtagtcttttcattctgataattcctctaaggatgtttagggaaatcacagaaagtttatattaaaatttactgttgtttcaggctactacaattaccatttttctgagaacattattttctgaatctttttaaatttttcatggaaactcattacagttctttgtttttgtcttttgacatacagtaagccagagaagaggcaattaaaatattgatagtaactgaattatgacagatttcttgaaggaaactctgttttgttctgccagggactttccccatggaattwggcaaatttactgtttatttttctttatgaaacgtaagagttgccaagcaaagtatttctaagtaataatctgtaaaatgagccaaagatgagcctagcaaattcacttagtagtcattaaaagaattaaaaacacaagagctgaaacatgttattgagccactcataagttagaatgaaaaaaagtattttttcttttgaatgaaatgtgaattttgaaactgtttatttttgagtgtttaaatgtgatatttattgtaccctatcttcacataacatgatttatgttttcagagagctcacaatctaaagtagaattgacccaccaataatagcttgcaaacacactcaagcttttcttgttttttgaaatctttctaaaaattttcctacttggatttctcatttttcccttaggattttgtttaatatggatttaatttatttgaagaaatggtaactcagatttacatattttatttatgatcagttcctctgttagactatcaaggttaaatcacaagtatattcatttattcaagaaayatttttaagcacctgttttaaccacttttcttgttgctggggatttagcagtatttccaggggtaatgcttatatggattttacattctagcgaataggagacagataaactaataaatatctaacatccagatagtgatgagtgttaaaaactaagccaacaaaatgatgaaggtgtgatgaggagtgctggttacatggctggttagagaaaacctctaattttgagcttctcgccaagaccagtacacaaaataaatgctcatttgtatctctgctctgtagctacagactgcaatacatagagtgacactagctcagacagcagtgcctgtgctttgtggaagtgccctgaraaacaaagggatacagcccttgttagatgctgttactatgtacttaccttcacctgaagagcgtaactatgaatttctgtaagtatgcaatcacatatattaaaattctatagctttgaagaaacaagtaggcaaatacttttatgaaaagtagttaaatcaccatttttgaataatagtggtgagtgttattgcaaatgatgtaataaggaatcatagtaatttttgcttgaaaggaacatttttcatctcttgtaaaaagagatgtcttacacatagagctaagaggtatgtcttttcactgtgtaaaagtgtaagtgttgaccctgccatcttagtcttagaaaagtgatatcctggggatgtttgttaaatattctatagttatattcatctggatttcaggatttttcataagctcaaaatattttgtggctataaagaaaggtcattgttttactcctattgtcactaaaagctttgtacttaagtaataagtcctttaaaatctgagtaagcaatgtgtaaaatggcagagaaatggactttaattatcttaatcctgacattaataacttttcatatctctaaattggagaggcatgatggtgaagagcacaggctttgtactattggatttaaatcctagcttttccaagttccttaacatctcatctataaaatgcaaagaataggacctatctcatggtgttcttataagaattaaatgattagtaaagcacaaagaacagtgcctggtatagtaagctctatattagtatgtattaaagttaaaaattggagggaatgggaataagattggagaagttctgtcatagaagtgtttaaactactttaagtcaggaattcctttgaaactaatgaaaatatggagctctccttagatgcgcaaaatttggcaattgcaggagaactcaattctaaaacttaccagtgattaccagtttaagaacatcattctgttaagagtgttggttatgtgaacaatttcaagtttatagtatagatttttatggttatgtaatggacagaaagtggaaggagagcgtaaaagcagtaattggaaagtacctatttatttaccctgtgcagatttcttgataagtagtgtgatattcccaggtatagccttcatggggagagctcttggcaatgaaattattcacaaatagaagtaatatttggaagagaatctgttatttttagttttgaggaattaatggtaagatctccattgagtaatttagtcaatggaagaagagagttacgtaacaaagacattatttagtggctctaagtagctctactagaagataaaatagatctttggggacattaaggttaagtttctgcagttatgggaagtgtattttataggcctttttggaatgtttattttataggcagtggtataaggatgacttatgtgcattggcatttaaagttctccatgacaagcagcgaggaccactggtttttatgcgcatttactcaggcactataaaaccccagttggccattcataatattaatggaaactgcacgtaagtagaagcttagattattttataaaactgtatgcacttctttaaaaatacttttactaacataaaattgtgattttayagggagagaataagtcgtctgcttttgccgtttgctgaccaacatgtagaaatcccttcattgactgctggtaacattgctttgactgttgggcttaaacatgtaagtgaccaaatgatttctctaggaaataacagcttaaatatttaattacaagtaagcaacttgtaatatcaaaaacccataaacaatccaaatgtccatcaatagtakaataaagaatattatggcatatttgtcaacatggctgaatctcatacatttactaggaagaaaagtagattacggaagaccacagacgggatggattgtattcatataaagttcaaatccaagtaaaataacatactgtttatggatatatatgtatatacatatatgtgtgttttaagtttatataaaatattgttttgttcccattgggtttattcctatcttgagcattgcaaaaaatttaacctagacttataactgatcaggttataatgttttgttagtaaagcctccatgagagcaaggatttttgtcttttttgttcaatgccctacagtccatagatcagtgtttgcatatagtagacactccatagataattgtaggatgaatcgatgaaaatacttgatgttgtatttatttttcatgggttaaaactaaggatatttcatttatatggattaaatcaaatattttctcattgacctttatgtagtaagcattgttattttaaacattttaactcttcatgactagtttcaagtttgaagatccttcagtagaaaattcctataggctggtcactggacttctggcattggaatgtcccctctatctccctgaaggcaggagctccttgtatgtatttgaagaagctctacaaatacattgggactattgcttcagtaggattgtttttacagagaaggaaactggcacagaacttcacaatataaaagtttagaagtgaaattacagtttttaaaagataattgggctctacatggaagccagcaatctgcacagttaagggtattctggttaattatatattttagttaataggagattttctgtaaaaaaggaataaattcttatgggtggtagaacactctaatggacttctccctaacctgtcttgtcatgattgaaaatttaggaaggtacatttgttttgccaaatgattttggatgtgtatgtgtgtgtgttttattgtttgttagaatttattacaacagtattttggatagaattcttatgcaagttaaattagctttacttatgcaaagttattaatgagctttttgaattttatttctcttttaagttctgatgaaaagaaagggccacaaraaagttttcttatattgtggttcttggtrtaagatgagcgcttgctaaatgccactttcgttccaagtcatcttgtttgcttgcagactgccactggagacaccattgtctcatccaagtccagtgcattagctgcagctcgtagagccgaacgggagggagaaaagaagcacagacaaaacaatgaagcagagagacttttattggctggagtggagattccagaacctgttttcttctgtaccatagaacccccatcactgtctaagcagccaggtataaatggtcttagtgtgtcaactaattagtgcgctgataatttatataaaatagttgcaatataccctcaagagatttcttatgtgattgaggtaaattttatctgaatatattggtaaacatttcttgtggttggtcttgttttttaagatgttttgatttttacaaatgccttcatttttttctcttcttatttcttggccattcttctcatattatattcttccttactcttgtagtgctatctatgggattctaagtaattggccttagaactgcccttctagtatattagattagacagtaactgattcataaccaattcagtttgtcatcatcatgtataaaaatgctgttttaccttgttttctacctcaacctctagaactcaatgaagatatttatatactgtggataatcttgtttgaccttttgttagtaactttgttctttagcattttagctcagatttttttcagtggcttctcattacttctagcacacacccaaactctttagtgtggtatgtaaaacccatgattccaattataatttccaattagatttggttacatatagcagaaaacccccaaataacaattgctttaataggacaaaaatttatttctctctatctcctaacagaagccttgaattggtagtcagggattagagtggctccacaatgttatcagggatccaggctctaatctttttgtcctgcctgagtgcatagctcctggagccttgggcatcaccttggagttcctgacaacagaaaggagtaaggggaaggaagaagataataccccttttctcttaagatttcttctatgtcattggccagcactgagacatatggcagcctgttgcaaggaagtctggtaaaagcagccttttaagtaggcagcagcagagtagagtggaaggctgctagtagtctctgccacagccttcttgcctggcttcatttcttgtgaaacttccgccttcattttgaccctcttctttaacccaaattagaataaaactatagtacctagccacaccttatgctcccacagtaaaataattgtgatttcctgaaggtaccgtgctcttttttgcatcgctatttcttttcttctgttctctcttgcattataatagtagcccatgaacttaacctgcctggaaaaggtttaccctttctttaggtctcacctcaagcatcacactttatgaggctctcactgaattcctatattagactgtttgtttaaggacagaccttctagttctagaagtggcattagaagccctctttcctttgaaaacaagttggactcacagattatgggagaacaaaagcaatctctattgcctccccttgtcttcctgaggaccctgtagggagaaagaaggaagatccctagcccagtagaggttacagttgctcacctccccaaatggagttcacatgaaagaaatctgaatatagatgtaagacagcccccagtactgaaggaaactgaaactgagtctttttgtgtccacttgctgaaggaatagcatttaagttaaaatgggcctaacagcaatttttctgttactttaaatgccttgaggacagttaagtatagtttttattctagtggaaaaggatcaggtgatgatgcatctggctgcctaagtatatcaaagttaaccaagctgrttgtatcaggagtggccaggcatttaagagcaggggctgcccaaacaaagtaacccatggattctttgaaatatatttgagagtcattttatatttcagatgcagcatgagcacctaaattcaaattgtgggcttgcagtgaaattgcaccagccagttttgcatctaagaactcaagcctttaactactttaggagaaaaagtgtggtatccaaagtctcattaatgggcattagctcaggggtcctaagcccccaagaggaagggatttaccaaagctcccttacttagacttctttcaagcagatctacatgtttcttttttgtgcttttattgtacttaccccatggtccagttataaccctcgatacctgttacaatgctaacatcacaaatattttaaaataatttattttacagtaaaagttatttttattccaaaagtcacttagtgtcatacgcatgtactctgtttgagtatctgtatgtgcttaaaataaaatattatctacaataatgcctcttaaccttgaacgtacatacacatctcttgggattcttgttaaaatgtagactctgactcagtaggtccagaacctaagattccgcatttctgtcagactccaggcattaccagtgttgctggtccttggagcccactttgggatgtcaagggtctagaacagtattgtctagtagaaatataatgtgacctacatatgtaatataaaattttcttatagccacatcaaacaaactggtgaaataaattttcataatatatcaaaatattacttcaatatatcaatattaaaattactaatatttacaatattaaaattattaatattaytgagatattttacattctttttttcacagtaagtctcagaaacctggtgtttattttacatttacagcatctggcagttcataacattaatacccccaaatggctgtggttaccatttggatagtgtgggtctaaaaggcctggtttgtatacctaagatactttgaatgtgtgactgataaggttagctcattaatccagtgctcagctcttttctttagctacactttgtctgtggaacttctaacatatttcttttataaaaagagggagagtatacttatcagttaattgagtgtattaaaatatcactttagatggcatacttaatgccatctaaaatatacattattttcgcaatggttgtgataattcatcatagagttatactagtacctgtttattcatgatgtaattttagcctccttttggcacttcattattgccagtttttctgaaggcattttacttttttgtcagctcctaaattgatatttggaaaataaaatcagatgatgttactgttcctcttaaaacctttcagtggcttcgcagtgcaaacccaaacttttcatcatggcctacaagaccttacatgatatgatccctgccacacatctccttcctcatctgatgctattcttccttttgcccactgatctctagctgctagtcttcttgctctttttcccaacagcagattgttccttgtatagccattccctctatctgggattccttttcttcaggattttgcttatagtttgttcatttctgtctcaagtcatcctggagaggccttcctagaccactcagtctcaggtagcctcccattattattattatatcagcttctttttgtctctgcagtatgtatggctgtttgaaattgtctttttttttttttctttttttgtaaagacggggtttcgccatgttgcccaggctggtcgcaaactcctgggctcaagcgatcattctgtcttggcttcccaaagtgctgggattacagacgtgagtcaccacacctggtcgaaatttctttttcaaaatttgtttgcttatccatctgttttacccactagaacatataataaattatttaaaaaatgaaatgtaaagataacagttgtttatcccatagatttggaacatgcgttgaaatgtcttcagcgtgaagatcccagtttgaaagtgaggctagatcctgactctggacaagtaggtatattattgctaaactccagaagcctttctataagagtgtgtgtgtgtgtgtgtgtgtgtgtgtgtgtgtgtgtgtgtgtgtgtctaaaacattaagtctgtgtcctgaaagaaaaacctttctttttaaattctctcataatacaaatttctgcttttatgttgactatcaagctaaataagcaaattttccttatataattacacttcacatttataaactatttcccaacattttttaccattcctgaagacagctttttgtgaaattttgaaataaggtttaatcaaggcaaagccttgagccttttacgttaaggcttataaaagaagcatactagaaggaggattggaaggtgcttttgaagacagtaaaacacctaaaatgggagagaagtgatagattacaatgtaacactgtgagaggaagtggagttttaaagtaggtgcagaactgtgctgtataatatagcacagtagaacagatgttttgattcatcaagaaatgattaaattacattctgcatcctctttttaggaggacagggtaatgtttacataagattttagaaggagtttcttaaaaaggttataaatttatctttaaaaaggataaactgatttagttaacctggaaaagcatggagtactttgttttcccaaaatgccagccaaatgaggtagtaatttagtttaattgatactgaagagtatgataacagtaattaaaacagaaatgttttattttaaaaaacctattatttaaataattgaaatgtaatcccagcactttgggaggattgcttgagcccaggagttcaagaccagcctgggcaacataaggaaaccctgtctctacaaaaaaaaaaaaaaaaaaaaaaaattaaaaattagccaggcatgatggcatacacctgtggtcccagcgactcaggatgctgaggtgggaaggttgcttaaacctgggaggtcaaggccacagtgagctgtgatcataccactgcactctagtctgggtgacagagcgagaccctgtcttgaaaaaaataaataaaaataaataaaataaaaactggcactacgtttaaaaaaaaaaaaagcaaataatacacaaatctaccaagtaaataattaagtccgtttctctgttcctccatctcattctgcagaataaccactgaaaacttggtgaatagcctttcacactttttacccaaacatatgttcttctgctgtgctgttatgcagcagcataatatagttttgcaagtatatatgtacagatacctataaacaagtcattttatttgtattattttacaactattttccccaaatagttcactttttaacttaaagtatagcagtcctataccaagtgatttttttttaaatttgtgattacagttttattacagcaaaaggatttaaattaggatcagccaaagagacacttagagcaaagtctgggagggttttaaacatttgcaatgcttcctttatcctcagggacatgttaccctcttggcagagtattgccaaccagggaagctcacccgagcctttggtggccagaattattattggggcttgatcatactgtccatgtagttgacctttagtctccagtcccttccatagattcaagctaatacgctaatacctttagtcttcattggttcaaaaaagataaaagtcagtttctccctcatatgaaggttcaagctagtctgaaggttttgactgcttacaaagctgtaaagtgccctggatgattgggaaatgcccatgttgttgggaaaggttttttagaaaggttattccccccatttacaaggtatagccctcattctgatgtgtcatgacagttgcctacattttcgttaagaaaggggctttggccgggtgcggtggctcacgcctgtaatcccacctctttgggaggccgaggcaggtggattacctgaggtcacgagttcgagaccagcctgaccaacatggagaaaccccatctctactaaaaatacaaaattagccaggtgtggtggcacatgcctgtaatcccagctgcttgggaggctgaggcaggagaatcattcgaacctgggaggtggaggttgcagtgagccgagatcatgccattgcactccagcctgggcaacaagagcgaaactccatctcaaaataaataaataaataaataaaaaataaaaggggctttaccctcctcttataggcaccacccagaagctgtccacatcaattatattcatcttccattggccagaaatttggctttgcggttgggaagtgttggtatttagctaagtgttggcatcattagtcttagccagatgctacttgcccagcagataattcaactatcaaagaagaaggagagaatggccaggtaattcattgtttattgattcattattccagtcagaaaagtcaaaagcaatgttttgatgtaaaagccccgggccaaaaagaattacaaaggaaactgtaattaattaaaaataagtatgtattaacatcatacttttatatagtattctgcaataaatataatttacccttaatcttttatttcattcctctggtaaccagactgttctgtgtggtatgggggagttacatatagagattattcatgatcgaatcaagagggaatatggactggagacctatctcgggcctctccaggtggcatatcgagagaccatcctaaactcagttcgtgccacaggtaaaaagtaaaacatttaggatttgctttttctctctttctgtctttctttctctatttagttgctgaaagcagtgttcatagtcactaatgtcttctatcagaggagacagtttttatgtatgtggggtttttttgtttttttaggattttgttttgaatacagaaagccctatttgattatcagccataacatctcctggatgaccactcatcaaccaagtgtccttttcagtggtcatggaatagagtaagccactgaagtcgatggcttgtcccagtcctcactatcagaactagtctaagaatttgaagtcaatgtgttatttttactctataaagtaaaagtagaaagtcagtttcagtacttaataaatatgattattctatgctgatagtaatcttgagaaactatagtttttatacttctattcccaaatgtaaaaactcacaatttttctgcatatgattttaatttggttcccttaagccaaaaaacatgacaacaattattgctactcacccccaagaagaaagtgtggaaaggtttgtgggaaattgtttaaaaaaaaaaaaaaaaagacgtttaggataaccaggtactttcaagttcctcattagtttgtgagaagtcctgatggttacatttcactgaaacttgaaaaattaagcagaatacaggagcaaatagcatgaggcgttctctttctggactgtttatctggaaaaactaaaaatgctagagaactcaaaataacaacttttaatgtctgagctgactagaatgtaatagaattttccagaagtcaaaaaggaagtaggagtagtaatctgggaaaataagtcagcactataggctagagttattctggaagaatctgtaattgtctctaacctagtgcttgagagccatatcctcatggaaagaattaactaggaaaagtcctttccacaaaagcagagggcaaggaaacttgcttgtctggctgtatggtaagggaacaagatttctgagaatttgtaatcataggcttctgatacaggtctttagcctaagttcatagaaccagtgtgccctgaaaaactccagaccaagaagaacttagttctttagtgtaaagtgctcatggcttggtagtatcccaaggaacctggaaaaaagggcttctccaaagatatcatcaacccaggcctcagatgccacacatggccaggtctggtggctcacgcctgtaatcccagcactttgggaagctgaggtgggcagatcacgaagtctggagttcgagaccagcctggccaatatggtgaccccgtttctactaaaaatacaaaaactagctgggaatggtggcgagtgcctataatcccagctactcaggaggatgaggcaggagaattgcttgaatcccagaggcgaagttgcagtgagctgagatcgtgccattacactccaacccaggcaacagagtgagacgccatctcaaaaaaaaaaaaaaaaaaaaaaaaaagaaacccccacacataaaagaatattaactcataataaaattaaatcagaaaaccatgagaaaaagcacaatgagcaaaaaggcaatagaaacaataggtagtcataccagcaaaggcttcagttattggaattatgagatgtagaatataaaatactatctttgaagaaataagagaggcgatagaaagtacagttgacccttgaacaacatgggtttaaagtatgtatgcaggtacacttacacatggattattgtcctgcctttgccatccctcagacagcaagccaaacccctccttttcttactcctcaggctattcagtgcaaagatgacgaggataaagacctttatgatgttctacttttacttaataaatagtaaatatattttctcttacgattttcttggtaacttttttttctagtttattgtaaaaatacaatataaaatacatgtaacgtgttaattgactgtttatttgttggtaagtcttcctgttaacagtattctatagtagttaagtttcaggggagtcaaaatttaggcatgtattttttactgcatgggggtttagcacgcctagcccccacattattcaagggccacttgtgttagtaaggaacaagaaacgatcaaaaataggtgcgatgggcatgatctcacatatgtggaacttttaaaagtctaacttgtagaagagtagaatgatggctaccagaggctgaggattggaaagctggggaaaggagagatgttgatgaagtggggtacggagtttcagctggacaggagaaataggttctcatgatctgttacacagcacagtgactatagttaataatttatattttaaatctcagtacaaagaaataagttttttgacatgatagatgttaatttgcctgatttttatcattccacgatgtatacatgtattgaaacatcacataccccataaatatatacaattatttgttaattaaaaatgaaataaaacataagaaaggataatggaatatcatgctatgtgtgagagaggaaatggtcaaaaaatgatggtgagggggtatataaggacacaggaaccagcttgaagagactctgctggccaaatctggattaatttgaataccaagtatagaccattgggaaaaaatagtttctaagttcatacttataataatacataggtaaatagggaagaagagggaggggtcttcctcatagtggaatgccaagtgctgactgttagaagttggggagtagggctggagtcggaaaatagtgcagacgactctcccaaacacatagaacaaaaaagttgccgtatacatatggcataacaaatttaaaatgaagcagaagtaaactattgcttagaaatacatgcatatgtgatataacactaaagaaaataatgaggataacatatgatagtggttgcttcagaaggcatctaaatattggtaatactctctttagtagttttaggtttcatgaatgctcatttttagcttgtacataaatatgtatatactcatatataaacgtatatttatatataaacatgtatatattgagacaatgtcttgctctgttgagcaggctggcatacaatggcaagatcttagctgactgtagccttgaactcctgggctccagcaatcctcccgcctcagtctcccaagtagctaggactacaggtgtgcactaccatactcagctaatttttattattttttacagagacggagtcttgctatattgcccaggctagtctcaaattcctggcctcaagtaatcctcccactttggcttcccaaagtgctgggtgggattacaggtgtaagccaccacatccagcctgtataattttaaatagaaaatgtttcacagtataaaacgtaagcatacaaaggaattatgaagaattatagactataattcttagttttgaatttgggccatgaatcactgcattacatggtccctcacataaatatggcatagttttgttttagtaaaatattggagattggtaacagacatagtaaaatattggagattgttggtttttagcaaataagagatgctgttttcaatcttaccaaaaacactttactggttttttgggaaagaaattgtaaacagtaagtgcataaaatattgctggaaaaatacacaatataaaacattttgtgggttgtcaggatttaaagtcgtttaattttcattagcttaccttttatatttgtaaaggttttatcatttaatttttttaatataaaagtttgtaactaagaggatttcaatcacctacaagacattttgaaaagtttaaaagtataatcttcgtaacatgtgcctcaacatatcttaatgttaaaacaataggtgatacagagcaggtttttaacattgatcaacacagaagcagatgctttgttggtagagctctttactctgatttttatactgtatttagtgccattgttaatattctctcccactttatcttgtatgagaccctgagcttgttgatgataattttgctgtttatagtaccttgatacctttccagaattaatctctgaggtgccatattcaatttgtttacagataccttagatagaactttaggagacaaaaggcatcttgtgactgtagaagtggaagcaaggccaattgaaacatcatctgttatgcctgtgattgagtttgagtatgctgaaagtatcaatgaaggcyttttgaaggtctcccaagaggccaytgaaaatggaattcacagcgcatgtctccaaggtaagacactcaaatgagagtaagcattagtatcccactcaaccatttaatcactccttatattacagattatttcagtctttttcctaactttgttagtgttttctccctattcctttgcacttctcagwtacttctcacttcacatctagcagagtatgatacaatttttttcccttgtctaggaccattgcttggatccccaattcaggatgtagcaattactttacattccctgacaattcatcctggcacctccacaactatgatttctgcctgtgtctcaagatgcgtgcaaaaggtatagaactatcctaatccttatggctttaaggtgactcttctgagtatagtaccactgatcttgcagacagctgtgtttacagagccttatcttgtgtctttgcctcctcagccttgtggtcaacaagagttcttatcatggagaatctctgatttcttaatcaccaggtttttatttcaaagaggatcttagaaattactatgtaacatggattgctattggaatatactctgataaagaggcaagcttccttaagtgacatttctgctttccccatccctgacagacagctattagaggcaagcatggtaggtttgagtagaagccagatttgaggttagcttggcccaaaatggactgtaatctaaagaacactgaagatccaatattggttccagttttggagattgttattcaaataagattgctttagtgcttgcttcagcagcacatatactaaaattggaacgatacagagaagattagcatggccctgcacaaggatgacatgcaaattcttatagagttccatatatttctctacttatattaaattataaagattgctttaatcaaggaccattgaaaccagttaagtcccactgaataacagattcaggctaagcaccttctcttctcaaagcatcaagcaatgggtcttcttggtgtggttatctggggagtttgtccttaagtgtcgtggaccctccgcttcctgcctcatgaacctaccagaactggattaactcccaggagtgtggtatgctgaatgctgattccatgcattcttctcagcattgaactaccctaatttcttaggtgattgcttttgcattatttatacttggttttatagccattttttaatacttggactgtgtttgagacccaattttctgtagttttatttgaatccgaaattacaaagttaatttaagtattccaaacccctaacctaagaaagccaaacttgatatctcttcgacatgagtttaaatttatacttcttaaaaagctttttgattaaaaacaaagctttgaaaaaagtttaaatattgttcacctaagagtatgttggaaatgttacctgcaaagtagttatgacgatattgttgagaaaattcaccctcaagtaatttttaaattgttttttttttttttttaagagacaaggtctcactatgttgcccaggctggtcttgaactcctgggctcaagcagtctgccaacctcggcctcccaaacccaaagtgctaggattacaggtgtaagccaccatgcccatccccaagtaatttttaaagtttctctggaaattggttttaatattgaaactaaggtaatctgaaaaataatgcagtttctaaattgaccccaagccctcaatatattggcctgtccttcaaaatgtaatatgccttctaaaaataaagtctgcatttccatgttcatttgcctttttaataagattatgccagagaacaagaattaactttatgggggcttacatttagtcattagtgttaattcgttacttcaaacaaaacactcctaatggaagtactgctacccttgttaagcttcttctaatggggaatctccttctctctgcttgtaagtgcttcatgtatttattgagtcatctgtgttgtgcttatagttcaccaggcactgagaaggacacaaataggattatattttactctacctaaaggagcttgtgatttcataagggaattaaatatagccaaagtattagataaaatgggtgaatgccatgaaagtagtaggaagcagggaattggggaggattcttggaaagatttatatttgagctgagatgattttggaggacgtgagcatggtgggggacattccagacacagataagagtccttttaactgtagtaccagatgaaggcaggggagttgtgtgttgaaaaagtaaaatggtttcagactgtagagaaaactttaaaaactacattaaagagtttgaactttgttctgagaatggtggagcataatttaaaggtttcgaagagagaagtatcaaagtacagaagggatttgaatagggaagagatagtagaggacaggaaatggactaagtttgacctaggatgccagcaataggaatgggaaaaacaaaaaaaatcttacagcttacttggggaaaaggaagtcaaaggtgaactgaagactactgatgtcatcatcagaaaaagggatgtgcatagaagtgtttggagaagaaaatgatgagctcagtgtgggacatgttggagagctgccggatattcagacactatcccaaagcaggccaatggagtacaggactggagcactcaaactatgggctgcataggatttaacgtttttgaggaagccatgttgaagtcgtttttgaagctctccagataggtaatattgacaggaaaagattgtgaaaagaggactaagaacagttctgtgagcatggtatgccctagttagatatgcagaattcaatcttttttaggatttttttctcttaatttttacatccttttcaattccattattttattctgaaagacattttcagtttccacattctttatgcatgttcttcttggcctttgaaatctaagattctaaataagaaaagattttacataatgtttctactaccttattgcactaaatttttccttttttttaagctctcccctttattgctgtctctggcatgtggcatggcatggactgtaattatagacatcaggaacagaaacatgaggtttaaatatgaacaaatgaatctttgaaaggggaggactttctgtgactctgaccacatgttcacaggcattttttataaacatccccttgcatcataccatacaaaagatctataaattctgttatcatgcttattatacaagcaaatattatagttgttgccatcttataaaacgttatctttaaagagagagttaaagcaagcttatgtctttttgtatgagctctaggctgtatttattttaagtttttatttatgaaagataagttaacattctttaatttctttaggctctgaagaaagctgataagcaagttttggagcctctgatgaatcttgaggttacagtagctagagattatctcagccctgtcctggcagatctggcacaaagaagaggaaacattcaggaaattcagactcgccaggacaacaaagttgttattggatttgttcccttagcagaaattatggtaggtactttgtaactgaaaagtacatattcttcttaattcaggggatattatatgccaatgaatagacaatcagtaacctgaaagaaacattaaggctttgatttagagaatacatgttaagtttcgtttcaaccagcaggaatggttaggactttgaatttaaattgttggcgaaatccagggattatagcactacaagggggtatttacagtcccaaaatgtggtaccagcctatatgaccattttttccctgccaagcatttatcttacttccaccattgtcagttttaaggcaagttatcattcttctcccgtcagcctcttctgctccaggacaggcacctgggttgccggcaaagccatctaacaaatacatctgcagcacacttgcactactctgctttctgtcctcaatgtttttatatccaayttaccctgaaaaaagttaaatcatctgtttggaggaagtgatatggctaagccacaaaagtggcaacatcacttttccctaatagtcaaaagataatcagcaggaagagaaacttgaggcttaaatttgataatataaatgacttaaattattttgattagggttattcaactgtgcttsgaacgctaacatcaggctcagctacttttgccttagaactatctacttatcaagccatgaatcctcaagatcaaaatacactgctcaaccrgagaagtggtttgacctaaatgttttagtttttggagagaaattcaggagcacctagctacttcattttcagtaagaacaatttttattgctttatttattggacgaataaagtactgtttcagtacattcagagaactagataaaagatataacttaagctttgatagtggcactggagccacccgttttaatttatataatgagaaatgtgctttgatgtttaaagccactgtacctgaatcatgctgttcatctatgaagttattactataagtagccttcagaagagtggtatcacaaagttgtgtttcttttgtgtccttaagcttgtctcacaagaaagatgccaggcytctaaatgtaataagatagagggtcaaaggttcaatcaataaaaatattttattcaaaaaacagtctaatatcttattttacatgatttcaaaataaagttgattgtagtacagattgctgtggcctttttcccctccattttttacatgttctcatggttacaatatccagcataaagaggttgtgyagctattccacgtctgtagataacatgaataaagatattttagattgatttagattgatatcattcataaagatattttagattgatattcatgtcatcttagaaacttaaattagaatcactaaatcacagcattactgaaaataagggaagaaaattaaagcaactcaagatggagttctaagttacaccaacattttttgtatctataaaacagtcacaagtctgaatatatctttacaggtattattacttacaaaaaaataattcctggtttcttctaattactatttgttaggtaacatacatttctatttatagcaaaagaaactaacactgaataagaaggttaaaaatcacactggacttaatagatttcttactcgaccatcctgyagyggtgccttgtcagtctgtcataggcgtcatccatatctctgacatctttggaactccagagtctctcaccaacagcacttgccygaggcctaaaatttaaatcacacatccccccgcaagcagtttaaatttatgtttagcacttttgtgtttagacagagaaggaaagctaaggcaccttaattcttaaatgttatcaggtaaatcccataccataatcttggagtgaggttagttgcatccacatattctccccatagacaagcttctccaccaatgaaaagttgtttctgtttctgagtacctaaattaaaatcattgaattaagttcagaagttcaaagcttatacacagaggcaatatttcatcaagatttgtttcctccatctttatcctagggcaacatttcttgcccgtggttagcaggaccttgggagatgctaatggttgtggcacaaaaaagatggcccctcctcttcccccaccccccaaaaaaatggttgcaaactttatccccagccctgacccacggttcacagcacgtgttagcaccatagattaatgtagtgggccagtattaaacagttttattttggttttatgcaaacttacctggacaccagaaaccattttttaaatccctggttgcctatttagtagtgtgccagggaatagaagttggaatactagttttttagtggactgtgaccaccatgcctacctttaatttctacctcttggcatttaaaacagaaattgaatacttaatgtgtgtgtttttttttttttttgagatggagtcttgcttggtcacccaggctggagtgcagtggcgcgatcttggctcactgcaacctccacctcctgggttcaagcaattctctgcctcagcctcccgaatagctgggattacaggtacccatcaccacgtccggctaatttttgtatttttagtagagacagaatttcaccatcttaggcaggctggtcttgaactcctgacctcatgatccacctgcctcggcctcccaaagtgctgggattacaggcgtcagccaccgtgcccagccacttaatgctttttaaaaatcagtaattatcgctttttggtcctcataaaatgcattgtatataaaattatcaattcttaatagacctatggttttgaaacttttttaaacagcaaaatcctttttcagtgatttttcactaaaggctaatgtacaaaattggacaaactagaatgttttttatgaaggggatctgagagcctgaagctccacccttcagatgttccctcctgtcccatccaccaaggattctactcctcagaatcctaagacaacacagcctgaaatccactgaactaaaactatagctttgcttaggtgtcttacattggagaagcagttcagaagagggcatgtaaggttaatgcaatcaaatacctttagaatgtagagagtgaggagccatcactgaaaatggagataaaatctaaggggatctataatacttttgaagttcttgaatttaggcaactgtatggtttcttgagagtttaaaatgatactgaacttaaaaaaacacataaaatcaaggatcaaacataaaagatagttggtaggtaatatctaggtaaagacttctggggtgggaggttagggaagaaaactcataaaacaaaggtaacaatggttgcttcacttaccatcagcttcacagtaacccacaacacttggaccaactgcttcacttaccgccaaaatcaagaggttccactttatagtatttcctccaatcttgtccakagctaatcaaatctaagtaccaaggagcagaaaggattacagggaagccagatgctgkgactctactgagttcctcaggatatgcgctgtctttccatacttcaactattgtgcccggcgcaagctattaacgttacaaattgcaatacatattattaggcctagaacagtagatgaaattgaaagtttaaggcattattactaggaacataattttctaagatccttaaaaaaaatctgcattttctttttcctcttttcttcagagttagtgccatgtgatactcattttagggacttaaaagtttcatcaaccttaggtttgaatatttaacttttgcttatatatggataccacataggttcagttaactaaagctgagacttgcattttagtcttatttctaccaaacctagcttggaactatgaggtccaaagtggtcactaactacactagaaaggtaatactagtagttagacttgcaaattcccagttgccccaagaaaaataattaagtctcttatattgatcagatgcagtcttcacaatgctcacctttgctttatcatcaaaaacctcctgccagacaatggatcccttgtttatggttgcaataatatccaaaaccctagtattacaaaaaaattatagttattttagatcataagcttaacaatatatttaaaacatgtacattttctaccaaggatttcttgcattttgagaggtgccttttagtatagttcagctttatagcagaagcagctcaagttgggaagtgtcacaagtagttcctcctttttagcacttgatacagaacctaacatagtatgggggtttaataatcatttgctgaatgaatgagttaaacatgcccctaagataggaagaagtggcctcaaattgagttggtaggcaactcaggaaattgtacaaacagcaatctcttacaattttatggctgtcttaaaatggtagggaccacgatctagcctgtcatatcacataaattacatgtaacagttactgacaatccacaaatatttacagatatttacataatgccaggtgctctgcagataaataacacttaaatgcatcacacaaaaagctgaacaggcaaaggctggaacctgggcttgccaaataaatggtacagcataagggttggcaactacagcttgcaggctgtttttgtatgtctcatgggctaagaatggtttttatatttgtaaagcatttttttttaagttttaaaatttgaggttttttttaagttaaaaaaaaattgtatgtggtccatgggcaattgtatgtggcccatgaagcctaaaatctttactctctgaccctttacagaaaaagtttgccaatccctctagagcagcacggtctagtagaacttcctgggatggaaatgtgtatatatatatatatatatgcatttttcagtatggcagtcactagcctcagctggctactgaacacttgacatgtggctaatgcaactgagtagctgaatttttaactttcattaattttaattaatttacatatggacagacacctgtggctatggctactgtattgggtagcacaggtatatagtaaaatatatgttcctggaattgacaaaatggaatgaattccaggggctggatggtagtgaagacttcacagggtagccagggcttcaagctgagttttatatttattgatggattgattgattgattgattgagacagtctcactctgttgcccaggctggagtgcagtggtgcgatcttagctcactgtaacctccatctcccaggagattctccctcagccgcccgagtagctgggactacaggcacctgccaccatgcctggctaattttttcatttttagtagagatgggatttcaccatgttggccaggctggtctcgaactcctggcctccggtgatccacctgcctcggcctcccaaagtgccgggattacaggtgtgagccaccatgcccagcccaatctgagtttttagaacagatgactgccttcctatatttcaacagctattggaaaatacttggagtcaccatgttactgatttaaagcaagcagtgggtattgcctcctttagtgatttttcacatctacacttaggcaaaggatgtagagaaaatgtaaaaaataaagcacattactaaataaacttttacaaaaagcattaatacagaaataggctttcaaacaacttacttttgaatgtagaaagattctagtttcttaaaatctgtgccaaagcctttttgcctcatgaaatcttgaatttttggatttgattccctgaagcaaaaagtgattaaaatttcattagaagtttgatatgctcagtttattatttagagcagtatacatgcctaacatcagttgtgcagacttaaaactattaaagtttgtaggtagtaaaaagaagcctaaaaacttaattacaagttatcttaattatccattgcaaacaattttttcaagaagctgatttcctttaaaaatggctttctttaccttaccacctttctcctccatctaaagctatttgcagagagaatttttatttgaaaaatctttcctatttaatcattgattgccctctttcactaaaggtgttctcatttcacagtagtctttttttgaatctccattttcttctgcatcttgtttttcctcaagctttactttgccataccaaaatgtacattctccacaaatctaccatctcaggagtcatgttgcccagtttaaacccttacaagcaggcatgttactcttaagtcttccttatggtgtggagccctctacagctacttcaatgcaacaggttttttattccatttttttttttttttttttttttttgagatggagtctcactctgtcactcagtctggagtacagtggcatgatctcagctcactgcaatctcttcctcccaggttcaagagattctcctgcctcagcctcccaaggagctgggattacaggtacccaccaccacgcccagctaatttttgtatttttagtagagatggggtttcaccatgttggccaggctggtcttgaactcctgacctcaggtgatctgcctgcctctgcctcccaaagtgctgggattataggcgtgagccaccgcacccagcctctcttttttttttttttaaaggggttttaaggaatcatcttaccaacatttaaattccacttcatctcctcccaaatgaatgaattgatctggaaacacctcactaatttctttgaaaaatgtagtaaggaagctgtatgttgtattcagagtagggtttataggtccaaaagagtccaacttgttttgtctactgtaacatggagtcaggaggtctttctgacctagaagaaaatattaagattctttttaaaagaagtgtactcattataaagatctggttttccacatgattttactacgtcattttattgaagctacaagattttatacacaaaagatgaacatgtttactaagagctagtaatttcttccagataagaagggtttcctgaatcctgtctctttgcctctttgtttcccattatatctgagattttatctatgtcaaatgttagtaactcccaaatcttcagtttgcctcaacgctttttcttgagcttcaattcatatttcaaattccctg

SEQ ID NO: 95752 - DNA, 42665 bp, Homo sapiens
gtccttaatactttcttacagagaagaagaagttggatgggataccgagattaaggatgatgtgattgaagaatgtaataaacatggaggagttattcatatttatgttgacaaaaattcagctcaggtattttcatctttttttataaatgatgttaggttgttcgtctctaccttaatcttcgcacattatgtggtgcatgttatggttaaccgtcttccattatagtttttgtgtgtgtgtgcctgaaagtagctttaatatagtggctaaataaaccctccaaaataaaagaaaatcagtaacaatttgatcagggtatgagaggatttctagtaatgctcaaagcttgccatgaaatcttggcatcttgattcattcttaggctgcatacaaatcgtagagaaaagataaaacggcaaatttgagagtagaagtcattttttaataaaattctagtatacctattagccagtggaaccattatggtaaaccagtttgtggttatagagcactaagtttctacaggcaacttgaataaacataacttgggtccattttgcatacagcaacatctttaccttttttttcattttttctgtagggcaatgtgtatgtgaagtgcccatcaattgctgcagctattgctgctgtcaatgcattgcatggcaggtggtttgctggtgagtttgaatttattttttgactgattgttattaaggctctataatgaagatgctaaacccaacatgtctgtttcttttaataggtaaaatgataacagcagcatatgtacctcttccaacttaccacaacctgtttcctgattctatgacagcaacacagctactggttccaagtagacgatgaaggaagatatagtcccttatgtatatagctttttttytttcttgagaattcatcttgagttatcttttatttagataaaaataaagaggcaaggatctactgtcatttgtatgcaatttcctgttaccttgaaaaaataaaaatgttaacaggaatgcagtgtgctcattctccctaaatagtaaatcccactgtatacaaaactgttctcttgttctgccttttaaaatgttcatgtagaaaattaatgaactataggaatagctctaggagaacaaatgtgctttctgtaaaaaggcagaccagggatgtaatgtttttaatgtttcagaagcctaactttttacacagtggttacatttcacatttcactaatgttgatatttggctgatggttgagcagtttctgaaatacacatttagtgtatggaaatacaagacagctaaagggctgtttggttagcatctcatcttgcattctgatcaattggcaagaaagggagatttcaaaattatatttcttgatggtatcttttcaattaatgtatctgtaaaagtttctttgtaaatactatgtgttctggtgtgtcttaaaattccaaacaaaatgatccctgcatttcctgaagatgtttaaacgtgagagtctggtaggcaaagcagtctgagaaagaaataggaaatgcagaaataggttttgtctggttgcatataatctttgctctttttaagctctgtgagctctgaaatatatttttgggttacttcagtgtgtttgacaagacagcttgatatttctatcaaacaaatgactttcatattgcaacaatctttgtaagaaccactcaaataaaagtctcttaaaaaggccacaggagatcttcatttttcaaatgttttaaagttacagaaatttgagaacagaattagcttcttttagtctcaattcagtacttgcctcttgggaaaatgttccgagtctgcggaaacttgccctcacgttgtcccccatgaattcctttattctattagagtctagccctgtgtattttagaagaatgtatcaaaactgaggggtttaccaaaaagaaaaggaaacagcctggccttaaaacctgggcattcttggtctcctgcattgtctgggcatatttatgaagaaattttcaccatttacaatacatacttaacaaaatggcttaacttcaaactggtttccaaaattgatttatatattaatatattaaataaggtgcatatattactgtattaaggggttttgagctttcatactagttgggaagcaagctgtcaccatttatactcaattctcttcaactgtttatctcttggtaaatcttttgagtaggaaatgctgctcctagcttatcttcaaatactgagttccttacctcatttgttcaacttttttttttgttagcattgaagcacaagttttacaggcttattcagaatttcatatcagtcgttttgtttgacatttatcccaataattgttctagtgatttaatttgtatggaaactcccaaggttcaatttctttttctttttgagatggagtcttgctctttggcccaggctggagtgcagtgatgtgatctcagctccatctcccaggttcaagcaattctcccacctcagtctcctgaagagctgggacaggtgcgcaccaccgtgcccagctaatttttgtatttttagcagagacggtgttagcccggctggtctcacactgacctcaagtgatctgtccgccttggcctcccaaagtgccgggattacaggcatgagccaccgcgcccagcctcattgaaaatttacttttcaataccagactgcagagttctttggggcagagacactctgtcagtgtgctctttttccaaagtatctcctgctatcagtttttccccttgaaccaagtcttcctaacaaatttgttgtgtcattgctttctagggaactggaccagcaaatgtggcctttagtggttaatctcatctgtgccaaaatttagttgctaccagagtgaaatttggtgtgtaaataatgttcagaggaaatgtggttggagtgtagtaacttgaatagtgtcgtgcatagaaaacagctcattctgagtgaaactgtttatgtccaatcagttcctgagtcagcatcccactggttcgaaaatctgtaactaatctggtaatgtccttaatttcctcctgcctgtcagtgttccaaagtgttcatctagttttcttttatctttataataattactaccatctttgaaagttctgtttaagaaatgcttaatgggcaatgcgggttagtaactccagggtctgcgtggcctrggcaggtgagatggacaactgcctcattacagaagctttttatcatcaaactagtaagttttgtggagggcaagctatatagattgttgatgagtggttagaaaatcatctggaatttagccagttgagaagctacagaagtttctatttttttttacagtggatgaactgttttgctttttctgataaagccactaggtatatctaaataacaacctcgggctggacgtggtgccttatgcctgtatatgtgaacactgggaggcggaggcgggtggatcatgaggtcaagagtttgagaccagcctggccaacacagtgaaaccccgtctctactaagaatacaaattttttttgttttgagacagagtctcgctctgtcgcccaggctggagtgcaatggctcgatctcagctcactgcaacctccaccttctgggttcaagcgattctcctgcctcagcctcccgagtagctgggaatacaggcgcgtgtcaacacacccggcttaagtttttgtatttttagtagagacggggtgtcaccgtgttacccaagatggtctccatctcctgaccttgtgatccaccagcctttgcctcccaaagtgctgggattacaggcataagccaccgcgcccagcctaacaatacaaaatttagctaggcatggtggcacgtgcctgttatcacagctactcgggaggctgaggcaggagaaacgcttgaacacaggaggcagaagttgcggtaagccgagatcgtgccactgcactccaacctgggcgaccaaggaaacaaccaacctcaggatgaacattgctttggaaataatgcaatgtgtgaccttgaggaaatttcggcttataaatccattttttgaagtagtttttctcctttaaaatggtgaccgtagtaacaagcacagagttgtactgagtaattagttgaatagtatctatggaaaatactagacactcccaagttttccaattttggattaagagaggcaggccttgtgaaagagatactaaccctagtcattacgttagtccatctctttagtgcagaagatccttggcaaagctggataataggctgagagaagaatattcctttaagagagggacactgactactcaaagactttcttttattagtacatgggctgggattgatgggaagggacagatgtagttggcaaccatggttagcatcggatgcccatcccaatggccatgaatgtgccaaaggtgccgccactctgcatcatggttttcccratgccgcccatcagctctcgaccccgcattccgatcctgaggaggaaaccaagatggagctatttggtaacaaaaatatcagaaagagtattaactgctcctttccaattttttgctaacactagtctagcaacccctacatctgattttccacttactggatattatatcttactacctggggtgggtaatgagaaggaaaaagatccatctgggtctccagggtatttttctggtggatgtcgtattaactgccttcagtttgtgggaggcagcagatgcagtgtaaaatacatagagaaaccagcttttttgactggtgttgcctgcagtttaagacccaataaagacatctgtcttttagtttcttggtgttaatgattttggagtaaggtgggggttcaagagtcagctctacaatttacacatagtgtcaagtgtaaaatgggcatctcaacattatttacaggattttgaaaactacagtatttagcacagtgcttaacatagagtaagtgctctgtaaatgataatttacaatctagggatatggcaataacagcctctaaatgtgaaaatgacctttagagtgtaaagtttaactgctttatctctgtatcctgtatccagaatagtaaaaccgctgaacgagtttctttccttatgcgcaattggaaaaaaaaataaaagcaacagtagtaactagttactgagcacttaatatgtgccagatgctgtgcaaagtgtgctgatcgaatttttacaactctataagttagatgctactgtcttcattctacacttaaggaaacccagtctccaacttgcctaaagtcaccgaaccagtaagaaaagggccagaaagcattttgactctaaagctcaaattcttaagcactgacgcttccaacctgactttacagattgaaggtggtttggaatgagtctggctcgcgaggggacagagagggaagtcgaaagaaggaggctgtgttcaggctccaggccgaatggggcagggccggaaggtctggttgtcctgcccagagatcaccgcccgcgcccctcacctgagacaggaaaaggtgccgaagagcgccccggccgccatgcccacggsgcaacccatcacgaagcccattttgacacggtcgaagcagcttggctgggactgtccgtagggacccacggccaccggcatctgcgggggataggaaagtgtgggcccaggcgctggcccaagagtcgggcggggacggaagcggtaggctgggaagtgggcccaagggctcaggggaagtaagggaaggaaaatcagtgggtagcccgactccaccaccctcttcgcgttccggccccgcgtcgcccggcgcctacctcacctcgctcgcgggctgggtcgctcagctctacgtctctcacggaaaacgacggggagggcgctcgcggcccgatgaatcgcttccggagcgccgggcagcacttccgggagcctggggcccaggactgcagcggcttcggaaggtgggctctgccagcgggaccatgctgctccgagccgcttggaggcgggcggcagtggcggtgacagcggctccagggccgaagcccgcggcgcccactcgggggctgcgcctgcgcggtacgctcgggtcccgctctccgggaggcgcggacctgtcccctccgcgcggcgacgcaactgaatattccggagccttcctgtccaccctgctgcccagaccctctgacccttctctcaaatgacacatccctcaaactttcttaggcgggtccccgaacggttgaccccggcgcaccacccctcgcaccctgcgcgacaggcccccagagccgtggaggcgcgtccttcagaccgctcctggccaagttacagatgctgctccgggctcccgtgcagaccgttaccttcggtcagaagggactgcacctactctggctccacgttccttctaaacgtctttgccctttagagccttccttcctacgataccatttgaatatcaactcaacaccccctccaggaaccctctctccctctcccttacctccttttacagcgtgtcaggtatctggtgttgttttctttccattgagattcgaccctagcatcccttacacttayctcacctccagccagatttttccttctgccctttggatgccatgcgttcatagttgccttcggtcttacttggctactccgttccattttttatcagttggagaccgtgctcctcagtctgcggttcccgcagatacagccgctgccccggaggtggggccagtgctgcgacctctctatatggatgtgcaagctacaactcctctggtaaggatgaagcttttcccaaggctgcttataggaagtaaatgatgggcgtgatcacgcaaagaaatggctgaatccctggagaagtgagagccgtgaaggtgtgctggaaaaagcactgagcgaggagtcgggaggcttaaattcgaggccactggcattggctttactactcactagcaattgaccttggtcagatcacttcagcgcaggctctatagtattagttaaaagcatgggctctggaatgagcagaacggccacttagtaactgtgtgaacttggacaagtattaaacgggttaaaagactaatgcaagttttcaccaatgtgtgaccaggggtgtttgcctaggccctgtcctgtcccagccccttatagatcacattacctggcaggaatggaaacaccagcagaaacagatgtcggaacaaggcagtgtttgtagactacctgaggggaggcagaacaatccgagttgggatgggttgtgagtgggagtgtattaggttgatatttgstgggtagttttgtgggaacaaaagaatgtttgaggcctcctctaggcagtgcctgaggggttgagagtgtcttaaggcagggtggccaggtctgaggggtggagtgggacctgaattgacgatgcgctcaaggaaaatgatctgttctgttgtgttcaggacccccgggtgcttgatgccatgctcccttacctaatcaactactatgggaacccacactcccggacacatgcttatggctgggagagtgaggcagccatggaacgtgctcgtcaggttagtacacaggagtctaggaggttctaaggtcaaagaggggcagtggcctgtgggaggcatttctttcttggtaggtgtgcatggaggtagaaatggttttggattctttctggaagagattcaaagagcagccttggagtttgactgcaggcatttgattggttcccatatttcctggctaaatgacttgggcaagttatctaatttctttgagccttattttcctcatttaaaacagagattgtggtagtttctactctgtagggttactgggtggattaaataagacaatgctgataaagtgtttattaccacaacatctgtaagtaagaagtactataaatagtaagagctcaatagttctttttttttttttttatgagatggagttttcacatttgttgcccagactggagtgcagtggcgcacgatcttggctcactgcaacctctgcctcccgggttcaagtgattctgctgcctcagcctcccaagtaattgggattacaggcacacgccaccatgcctagctaatatttttgtatttttatttatttatttatttactattatttgagacagagttttgctcttgttacccaggctgcagtgcagtggcacgatctcggctcactgcaacctctgcctcccgggttcaagcagttctcctacctcagcctcccaagtagctgggattacaggcatgcgccaccacacccgggtaaatttgtatttttagtagagacggggtttctccatgttggtcaggctggtcttgaattcccgacctcaggtgatccacctgcctcagcctcccaaagtgctgggattacaggcttgagccaccatgcccggcctaatatttttgtattcttagtagaaatggagtttcaccatgttggccaggttggtctcgaactcctgacctcaggtgatctttccacctcggcctcccaaagtgctggggttacaggagtgacccaccacacctggccaatagttcattaaaaaaaaaaagttattattttgcattgggctggaaaagagcctgggatctgggatataactagaatctgattcttgtaggtgcagaccttcatccagggcaatttggtggaatgcagtggagctcttcttgctccagggctgtcccacctgtgtctgcagctctatttctgcctggggaactgatgttatatatctctgtttcttggcttgcagcaagtagcatctctgattggagctgatcctcgtgagatcatttttactagtggtgctactgaatccaacaacatagcaattaaggtaagagaagggaaccagagggtgtatgtgggctttcctgacctaggagatagtgtccctccatcatttggactcgtatatgtatttcgcagccatccatccccaccccattgtgaagagaaggcttgcagtctttctgatttgttgcttcctttaaccctttgcagtctactctttcttaagtctttgctgctgttggtctgagttgagtgaggcagttggatagcaaaggaggtggccctcaggccattaaccacttgttttttttttgtctggcagttacttcagagagtggataatggtgattgaaccttttctccattcttctttttttttttgatacatagtctcactctgtcgccaggctggagtgcagtggcgcaatctcagctcactgcaaactccacctcccaggttcaagtgattctcctgcctcagcctccagagtagctgggagtacaggtgcccgccaccatgcccaactaatttttatatttttagtagagatggggtttcaccatattggccaggatgatctcaatctcttgacctgatgatcctcccatctcgacctcccaaagtgctgggattacaggtgtgagccaccgtacccggcctttctccattctttttatctagtaacaacaagttatatatgtgatttcagggctgycctcctctcagccttcctttttctttctgatcagatctatttgcaacaagttcctcctgtttctttagatatctccattttgaagtgcttgtctttgtggtgccctctgcaggcattcacatggtcacccattctgggatcagtcattttgtcctgggtacatagaagatctttggtgctaatgcaaggaaaaggtacttttagtagtcacgttggtgtttcatagaacatagtcagatttcactgggcctggttgccaggattatgtgagtaaatgccaaggctctgagaaattgtggcttgctgtactttgaactctggctccacttgctctcatctttgtctttgaactgtgctgccagtgttggtttctttgaccttggcctgaatataggaggcctaggacgggcttcagggtcatcagcactctgcctgatcatgttaacaggaaggcatccttccttgggactgcagagaccagagagtcggggtgaaggttcctccaaaggtggagatggtttctgaaatggagagcattttcaaaacttcgaaaatattttctttggaagtctccacagattccaaaccaacaggtcaaggatcgctaagagtacctgtgatgatgtttcttttaatctccatgattggtagagtaaaataatctataaattgttaaagaaatctacatcatgggtaactgagataaaataaggtgggtgggtggtgaaatgtcatttaaatgaaatttttataaacaactgtaacattttgaactatcatcaccatcccacaaccattttttctttttttttttttagactgagtctcactctgtcatccaggctggagtgcagtggcacgatcttgactcactgcaagctccgcctcctgggttcacgccattctcctgcctcagcctcctgagtagctgggactacaggcgccctccaccacacccggctaattttttgtatttttagtagagacagggtttcactgtgttagccagaatggtctcgatctcctgacctcgtgatccgccctcctcggcctcccaaagtgccccacaaccatttttacttactgatgtaaatactttttaggataaaatagagtataaatcaattataaatgtttctcatttatgttctttgtcctcatgaacagaccatttttacatagttataattttgtcctatatggtttaatattctgcttttattttatttatgtgtttattttttataagacagggtctcagccgggcccagtggcttacacctgtaatcccagcactttgggaggctgagaccggcagatcatctgagatcaggagttcgagaccagcctgaccaacatggtaaaaccccgtctctactaaaaatgcaaaaactacctgggtgtggtggcacacccctgtagtcctagctacttggaaggctgaggcaggagaatcagttgaacccaggaggcagaggttgcagttgcagtgggccgagattgcgccattgcactgtagcaacaagggcgaaactctgtctcaaaaaaaaaaaaaaaaaagacatggtctcattctgtcacctaggctggggtgcagttgcacaatcacagctcactggagccttgaactcctggactcaagcaatcctctcatcttagcctcccaagtagctaggcttacaggcgtgtactagcacgcctgtctaattttgttattttaatttatttatttatttttttttgagatggagcctggctctgtcgcccaggctggagtgcagtggcgtgatctcagctcactgcaagctctgcctcctgggttcacgccattctcctgcctcagcctcctgagtaggtaggactacaggctcccaccaccacgcctggctaatttttctatttttagtagagatggggtttcaccatgttagccaagatggtctcgatctcctgaccttgtgatccgcctgccttggccaaccgaagtgctggttttacaggtgtgaaccaccgcgcccggcctgttattttaatttttgtagagatgcggctctcattatgttgcccaggctggtcttgaactcctgggctcatgtgatcctcctgcctttgcctcccaaagttctgggattactggcttgagccactgcacctggctttttattctgctgttaaaggtaatagtcttttataagctctggggagagatgcacattttctttccaagtttttaatttttgaaaaataattctgtcacatatggtgtgtttttttaaaaccaatggaaagatttaaaatgaagtgtaggccgggtgcagtgggtcaagcctgtgatcttagcacattgggaggccgaggcaggcaggttgtctgagctcaggagttcgagaccatcctgggcaaaatggtgaaacaccatctctactaaaaaatacaaaaaattagctgggtgtggtggctgtagtcccagctactcgggaggctgagacaagagaattgcttgaactcgggtaggcagaggttgcagtgggccgagaccacaccactgcactccagcctgggtgacagaatgagaccgtctcaaaaaataaataaacaaaaataaaataaaatgaagtgtaaatcttcctctccttccccaaggaccccagtccctgatcctgttctgcaaagttgatactgttaattctttttttttttcccaagggggagtcttgctgtgtcacccaggctggagtgcagtgccgtaatcttggcttactacaacttctgcctccagggttcaagcgattctcctgcctcatcttcctgagtagctgggattacaggagcctgctaccacacccagctaatttttgtatttttagtagagacggggtttcgccatgttgactaggctggtctcaaacttctgacctcaggtgatccacctgcctcagtctcccaaagtgctgggattacaggtgtgaaccactgctcctggcccatttttttttcttttttctgttttttgagacagagtcttgatctcacctaggctggagtgcagtagccagatctcagctcactgcagccttgacctccttggctcaggtgatcctcctgagtagctgggactacagatgtgtaccaccacgccaggctaatttttttttttttttttttttttttttttttagtatagatgatgttgctcaggctggtcttgaactcctgagctcaagcgatcctcctgccttagtctcccaaagtggtgggattataggcattagccaccaccacatccagcccccttttttttttttaattaattaatttatttatttattttgagatggagtctcaccctgtcgcccaggctagagtgtaggggcatgatctcggctcactgcaacctytgcctcccaggttcaagcgattctcctgcctcatcctcctgagtagccgggattacaggtgcgtgccaccacacctcgctaatttttgtatttttatttttatttatttatttattttttgagacagagttttgctcttgttgcccaggctgaagtgcaatggcgtgacctcggctcactgcagcctccaactcctgggttcaagcgattctcctgcctcagcctccagagtatctgggattacaggcatgtactaccacgcctggctaatttttgtattttttttagtagagacggagtttttccatgttggtcaggctggtcttgaactcccgaccttaggtgaccctcccttctcggcctcccaaagtgttggaattacaggtgtgagccaccgcgcctggccatttttgtatttttagtagagatggggttccaccatgttcgtcaggctggtctcaaactcctgacctcgtgatccacctgcctgagcctcccaaagtggagggattacaggcatgagccactgcacctggcgttctttttttttttttttttttttttttttgagatgcagtctcgctctgttgcccaggctggagtgcaatagcactcttggctcactgcaacctctgcctcctgatttcaagtgattcccctccctcagcctcctgagtagttgggattacaggtgcgtgccaccgggcctggcttattttttaatttttagtagagatggggtttccccatgttggccaggctggtctcaaactcctgaccttagatgatccacctgcctcggcctcccaaagtgctcggattacagtcgtgaggcactgcacctggccgctttttttttttcttcaatgagataaatgttttttttagtttcttgtaatagttgaaattccaggaatttttaaatgtacctttattgtttcttgtgatattaacagtaatacctactcatgacttgtttactgttatatcactggcacctagaaaattacttgggatactggaggtgctaaatattggttaaatgaatgaatcataaattccaataatatagagtagaactctaaacacattttcactgctaatttgctgtatatttctccagatttttaaatacctacattaatctgtatactattattattttaatagattttattttttatagcagttttaggttcacagcaaaattgaaaggaaggtatagaaatttcctatatatgccctgcccccaggtatgcacagccttctgccattattagcatcctccatcaagtggtacatttgttgcaattgatgacctgatattgatacatcattatcacccaaagtccatagcttatattaggattcactggtgttgtacattctatgggtttggacaaatgtgatttattctagtgaattattgaacttgaccgggcttcgggaagccctgaatttgtatttgactgggcagaagtatgggtagcttgagacccctgggacttatgtctggtatctgaactaggggcagtcttgtacgattgagcccttaacccatggggttttcactaagtctggagagttagcctcagaattgaattataggatactcagttggtatgagagaactggtgttggagcatactgttcttgcccacttttcctttacaaatgagattgaagtcattgctgtctctctgagtatgttctccttccatctgtcaccaccaatttctagggggtggcccgattctacaggtcacggaaaaagcacttgatcaccacccagacagaacacaaatgtgtcttggactcctgccgttcactggaagctgagggctttcaggtcacctwcctcccagtgcagaagagtgggatcattgacctaaaggtaggagtggctattggcaggaggagcaaaaatggaggagcctggcttcagcttgtaaatttctctcttgggccctagctggagcttgaaggaatagatctaacagttaggatgaagtttagagaaataagcctggcagagaacgagatcatgttccccttgagtgtgtactgtcctccttttctctggaggacttgtttctttttcttttttttgagatggagtctcactcttttgcccaggctagagtgcagtggcttgatctcagctctctgcaacctctggaggacttgttacttcttttttttattttgagacagagtttggctcttataactcaggctggaatgcagtggcgcgatctcggctcactgcaacctccgcctcctgggttctaatgattctcctgcctcaacctcccgagtagctgggattacagacgcatgccaccaggcccagttaattttttttttttttttttttgaggcagagtctcattctgtcacctaggcaggagtgcagtggcactccactgcaacctccacctcccgggttcaagtgattctcctgcctcagcctcctgagtagctgggactacaggcacgtgccaccacacctggctaattttttttttttttttttttaaaacagagtctcgctgtattgccaggctggagtgcagtggcgcgatcttggctcactgcaacctctgcctcccgggttcaagcgactcccctgcctcggcctcccaagtagctgggattacaggcatgcaccaccacgccttgctagtgtttttttgtattttagtagagacggggtttcaccatgttagccaggatggtctctatctcctgacctcgtgatccacccacttcggcctcccaaagtgctgggattacaggcgtgagccaccgtgcccggccacacttggctaattttttatatttttagtagagatggggtttcaccatattggccaggctggtctcgaactcctgacctcgtgatccacctgcctcggcctcccaaagtgctgggattacaggcatgagccgccatgcctggctctaatttttgtatttttagtagagacagagtttcaccatgttggtcaggctggtcttgaccttttgacctcaggtgatccacccatctcggactcccagagtgctgggattacaggcatgagccactgtacctggcctggaggacatgtttcttgcatttgttggtgttttctggtttgtatgggagccactggccacatgtgcaggatgccagggactcacattcaccatggcaaagctctggcctcctccttccctgcactgatgcttctcatcctgctaaagaagtagtgtcattttcttgaatcttatccaccagattttggatatcagcattcctagacaaatcctaacatgctgtttgtagatggacccctcaatccaaactccaaagtgttctcatcattcattatttcctctctttttcatcttatttacattcagtcatcaatcagtaacatttatatctatggccatttccttataatgtctctggaattatacttttccctccctcactcccaccttcccttcttccctccctgcctcccttccttcctttctccctcttttccctccctccctcttttcctccctccctctctctctctctccctctgtctttctttttttggagacagggtcttgctgagttgtccaggctggagtgcagtggtatggtcatagctcactgtggcctcagacttctgggctcatagctcactgcggcctcagactcctgggctcacctcacctggctaaatttttatttttgttttgttttttgagatggaatattgccttgtctcccaggctggaatgcagtggcacgatcttggctcactgaaaccactgcttcctgggttcaaacgattctcccaccttagcctaccgagcagcaaggactacaggcatacaccaccacacccagataatttttttgtatttttagtagagaaagggttttatcatcttggccaggctggtctcaaactcctgacctcaaatgatccacccgtcttggccccccaaagtgctgggattataggcaagagccactgcagctggcctggctaaattttttttttttcttgagatggagtttcactcttgtcacccaggctggagtgcaatggcacgatcttggctcgttgcaacctctgcctcccgggttcaagtgattctcctgcctcagcctctcaagtagccgagattacaggcatgtgccaccaccacgcccagctaatttttttgtattattagtagagtcagggtttcaccatgttggccaggctagtctctaactccttacttatggtgatctgcccaccctggcctcccaaagtgctgagattatagacgtgagccactgtgcctggccagcctgctaaatttttaaacattttttatagaggcaacatctcagtacattctccaggctggtggtgaactcctggactcaagtgatcctcctaccttggcctcccaaagcactgggattacagatgtgagccacctttctcggcctcctctcatttctttgtttggattgtatcctgcatcttagctgcctctggactttaatctctgttgcctgaactagtccttttgtagggtccagccccacagggtcggtgggttttctccccatgtgcagagacgagagagcgtagaaataaagacacaagacagagataaaagaaaagacagctgggcccaggggaccactaccaccaaggcacggagactggtagtggccccgaatgccagcctgcgctgatatttattggatacaagacaaaggggcagggtaaggagtgtgagccatctcyaatgataggtaaggtcacgtgggtcacgtgtccattggacagggggcccttccctgcctggcagccaaggcagagagagagagagagagagagaggagagagagagagacagcttacgccattatttctgcttatcagagacttttagtactttcactaatttgctactgctaacgaaaaggcagagccaggtgtacaggatggaacatgaagacagactaggagtgtgaccactgaagcacagcatcacagggagacggttaggcctccagataactgcgggcaggcctgatgtcaggccctccacaagaggtggaggagtagagtcttctctaaactcccccggggaaagggggattccctttcctggtctgctaagtagtgggtgtttttccttgacactgacgctaccgctagaccatggtctgcttggcaaagggcgtcttcccagatgctggcgttaccgctagaccaaggagccctctggtggccctgtccacgcataacagaaggctcgcctcttgtcttctggtcacttctcactatgtcccctcagctcctatctctgtatggcctggtttttcctaggttatgattgtagagcgaggattattataatattagaataaagagtaatcactacaaactaatgattaatgatattcatatataatcatatctaagatctatatctagtataactattcttattttatatattttattatactggaacagctcgtgcccttggtctcttgcctcggcacctgggtggcttgctgcccacacctttagcaacaaccttccagtgtgtcctgcacatcctcatcagactttatttctaaagtacttatttggccttttctcactttactcaaaaatcttgagagatttcccatttcctttgacatgaattataacttcattttgcctgatattcagagttctttacatggtgcctttttaagcacttagaaatttctgatgtaattcacataccataacattcatcttttgaaattatacaattcactggcttttaatgtattcacagtttccaacaatcatcactgtcatattccaggacattttcatcacttcataaaagaaagctatgtatttttcttttgtcatttgcacttttttttttttttttttttgagatggagtttcgctcttattgcccaggctggagtgcaatggcatgctctctgctcaccacaacctccgcctcccgggttcaagcgattttcctgcctcagccttctgagtagctgtaatcccagcactttgggaggcggatcacctgaggtcgggagttggaggccgaggtgaccagttcatctgaggtcagaagttcaagaccagcctggccaacatggtgaaaccccgtctctactaaaaaatacaaaaattagccgggtgtggttgagggcgcctgtaatcccagctacttgggagggtgaggcagcagaattgcttgaacccaggaggcggaggttgcagtgagccgagatcgtgccactgcactctagcctgggtgacaaaagcaagactccatctcaaaaaaaaaataaagaaagaattcattttgaaatccaaggtcatggagttttacccctgtgtttcttttttttttttttttgcgggggggtactgaatttcgctcttgttgcccaggctggagtgcagtggcgcgatctcagctcatcgcaacctccgcctcccgggttcaagcaattctcctgacttagcctcctcagtagctgggattataggcatgcgctaccacacctggctaattttgtatttttagtagagatggggtttcaccatgttggtcaggctggtctcaagtgcctgacctcaggtgatccgcctgtctcggcctctcaaaatgctgggattacaggcgtgagccactgcgcccrgctgcwatatatatatatataaaatattttatatatataatatataatttttttttatgagacatggtcttgctctgttgcccaggctggagtgcagtgacatgacctcggctcactgcagtctccgccttctaagttcaagcgattcttgtgcctatgcatcctaagcagctagaactagagatgtgtgccaccacacctggctatatatttatttatgaatgagagaggaacttgctctggaaccaccaaggcttacagcagccttgacctcctaggctcaaatgatcctcccacctcagcctccttcctgagtagctggaactataggcgcaggctatgatgcccagctaatttttttcttttttctttttgtagagacagggtctcccttggccaggtgctgtggctcatgcctataatcccagcactttgggggccaaggtgggtggatcacctgaagtcaggagttcgagactagcctggccaacatggtaaaaccccgtctctactaaaaatacaaaaattagccgggtgtggtggtgtctgcccataatctcggctactcaggaggctgaggtaggagaaccacttgaacctgggaggcggaggttgcagtgagtgagaccccgccactgcactccaccttgggaaacagagcaagactccatctgaagaaaaaagagacagggtctccctatgttgcaaggctggtctcaaactccttggctcaagctgtcctctgacctcagcctcccaaagtgctaggattgtaggtatgagccaccatccccagctatatttatttattttttatttattttttattgagatgggagtcttgctctgtcacacaggctggagtgcagtggtgtgaacttggctcattgcaacctctgccacctgggttcaaatgattctcctgcctcagcctcctaagtagcttggattacaggtgtctgccaccatgctccactgatttttgtatttttagtagagacagggtttcaccatgttggctgggctggtccaaactcctgacctcaaatgatccacctatttcagccttccaaagtgctgggattccaggcgtgagccaccatgcccggcccttattttattttattttattttattttattttattttattttattttattttatttatttgagatggagtcttgctctgtctcccaggctggagtgcagtggcgcgatctctgctcactgcaacctccgcctcccaggttcacgccattctcctgcctcagccccytccccaagtagctggaastataggcgcccgccaccacgcctggctaattttttgtatttttagagatggggtttcactgtgttaggcagtatggtctcgctctcctgaccttgtgatccgcccgcctcggcctcccaaagtgctgggattacaggcgtgagtcaccacacacagcctattttatttttgagacagagttttgctctggtcgccccagctggagtgcaatggcacagtgttggctcactgcaacctctgcctcccgaggtcaagcaattctcctacctcagcctcccgagtagctgggattacaggcacctgccgccatgcccaggtatttttgtatttttagtagagcagtgstttcaccatgttggccaggctggtctcgaactcctgacctcaggtgatctgccgaagtgctgggattacaggcgtgagccaccatacccaggtgtgagccaccatacccagcaatttctttctttcttttttttttttttttttttttgagatggagtctcactctgttgcccaggctggagtgcatggagtgcagtggtgcaatctcggctcactgcaacctctgcctcccaggttcaagcgattctcctgcctcagcctccctagtagcttgggactacagggcrcgtgccaccatgcctggctaatgttttgtatttttagtagagacaaggtttcaccatgttagccaggatggtctcgatctcttgactttgtgatacgcccgcctcagcctcccaaagtgcttggattacaggtgtgagccaccgtgcctggcctttttttaaatttttttgagacggagtctcactctgttgcccaggctggagtgcagtggcttgatctcagctcactgcaacctctgccccccgggttcaagcgattctcctgcctcagcctctcaagtagctgggattacaggtgcctgccactgcgcccggctaatttttgtatttttagtagagacggggtttcaccatcttggccaggctggtcttgaacttctgaccttctgatccacccgcctccgcctcccaaagtcctgggattacattcgtgagccaccacacccggctggcagtttctttaattttgtcatttcatactstcatgtggatggaatcatacagtatgtaaccttctgggattggcttttttatttttgtttttgtttttttgttttgttttgttttgttttttgagatggaatcttgttctgttgcccaggctggagtgcagtggtgtgatctccgctcactgcaagctccgcctcccaggttcacgccattcccctgcctcagtctcccaagtagctgggactaccggtgcctgccaccacacccagctaattttttgtatttttagtagagacagggtttcactgtgttagccaggatggtcttgatctcctgaccttgcgatccgcctgcctcagcctcccaaagtgctgggattacaggcgtgagccaccatacctggcctttctttttttttttttgaggcagagtctcactctgtcacccaggctggattgcagtggtgcaatctcagcttactgcaacctggatttaagcatttctcctgcctcaacctccgaagtggctggggctacaggtgtgtgccaccaggcccagctaatttttgtatttttagtagagacagggtttctccttgttcgccaggctggtctcgaacttccgatctcaggacacccaccaacctcagcctcccaaagtgctgggattacaggcgtgagccattgcgcccggcctttattggcttttttcactaatcataagtctttgggaattcattcactgctgcgtgtgccagtagtttgttccttttgattgataagtagtagtccatgttatggatgtacgaaaatcgtctgttgaaggaatctgggtagtttctaggtttttggtattacgaataaagttattgtgaacatttgtgtaagatgttttgtgaatttaattttcatttctctgggataaatgcccaagtgtacagttactgggttctatggtaatttcatgtttagtttgatgagaaacagaaactgtcaaactgttttccaaagtggctgtgatatttacattcccactaacaatgtatgaaccattcagagtctgtgcatcctcaccaacattttgtgttgtcactgtttttagttaactattcagataggtatgtagtataagactccttttcatgactaagtttgcctatattctgatttaggaggactttgtttgtactatctagtcaccttactcctgcatatccctaggaactagaggctgctatccagccagatactagcctggtgtcagtcatgactgtgaacaatgagattggagtgaagcagcctattgcagaaataggtgagtatcatggcttatccctgatccctgcccaccatggggctctgtatgaggtagtatactgagagctgtaatactctatggagtgtagttaggaaatcaagggaaagcctaagtactttgttcaaggacattggaagtgtcataggcagtatttgaatccaggtctattaccattttttttttcattgagacagagtatcactctgtcacctaggctggagtgcagtggtgtgatctcagctccctgcaacctcctcactctgggttcaaatgatcctaccgcctcagcctcttgagtagctgggactacaggtgtgtaccactatgcctggctaatttttgtatttttagtagagatgaggttttgccatgttggccaggctggtcttgaactcctaacctcaggtgatccgtcygccttggcctcccaaagtgctgggattacaggcgtgagccactgctcccggccaggtctagcaccttttatggtttttaattttattgcagttgctgccaaaaccaaccacaaaacaaaaaagcctgctactctttttccttttagaacatctctattctccccacatagagatcgccctgtaatttctttaggcacattagcacaaagatctgttaatcttgtttttttttttttattttgttttgtttgttttttaatcaaaagggatctagaaagtaatctgacattttgaaaggctggtgttaatgaggtggtgagaattgtatgcataagaatatcacgagtgtttcgatctggtgctttgcccttcatcttttttattctaaagaagggaagctactgagacacagagagggaggaagggggaagggggaggagggaaggaaaagaggaaggagaaggggtagaaggagggaggggaggagtttaatatttacaggtcatttactattkgagataattcacagtgcactgtgggactctgacagatgactttccaacattgtgctgtgggtcttcccctctgtttcctcagggcggatttgcagttccagaaaggtatatttccatactgatgcagcccaggctgttggaaaaatcccacttgatgtcaatgacatgaaaattgatctcatgagcattagtggtcacaaaatctacggtcccaaaggtaccagccccttctagagttccttctctctgtaccttccagcaagacctttgatagatgtttgtcacagtcatttgggactactgttgctctcagaggaagttgtacattcagagtcccttgtagaatgcaaatgtcatttagcaatagccagaaacacttgcttgtttgtagaccttagcagttactatacatcaggccawtctttcttgctctctttaacaaatccttagcaagcatgtagatcttaatttggttgaggaaaaatgggttttgtcaaatcaaatttatctagataggcccagctatcttgttttccccactatgatgtgcagagcaactatttgagtccctcattcccagtgtcttgctatagctcaggggaagattgcatgggatttgacatctctttgtgttctttttttttttcttgagacggagtctcgctcagtcgcccaggctggagtgcagtggcgccatctcggttcactgcaagctccacctccctggttcacgccattcttctgcctcagcctgccgagtagctgggactacaggcgcctgccactacgcccggctaatttttttgtatttttagtagagacggggtttcaccatgttagccaggatggtcttgatctcctgacctcgtgatccgcccgtctcggcctcccaaagtgctgggattatagatgtgagccaccaagcccagctatctttgtgtttattcttagaagacttcatagtctgttatcctgttagtctctcaaggatacatgtttgttccctatggtcctattggaatgtgttcaagcttgagttatgcctctttcccttaacccttgggaatagactgttgtcctctgttttgtgaaggtaaccataaaatataaatataaaatataactcctctttctcaagtgagggccttttttgggttgatgtctgtgctggtaccctttttatgtctgcagggtgtgttatctgggtgtataccttgtggaagtaggtgtaatagcttctggaattatggaagatggcgtcttctaagggttcccagaggttgtagagtgttttttgtgagttattatttcaaaaagcccagtaagcgttctgtcttttaataaaatgttgcttttattggcttttattgtagataagtctttttgataaaaaccaatgaactcaggctggataccccattcttcatcatgtgcctatttcacattatatgcctgtattaaaacatctcatgggctgggcacggtggcttacacctgtaatcccagcactttgggaagccaaggcgggcggatcacgaggtcaggagttcaagaccagcctgatcaacatggtgaacccccgtctctactaaaaataaaaaaattagccgggtgtggtggcatgtgcctttaatcccagctactcaggagactgaggcaggagaatcgtttgaacccaggagccagaggttgcagtgagccgagatcacaccactgcctgggcgacaggcgagactccctctcaaaaacaaaaaaaatctcatgaactccataatatatatacctcctgtgtactcacaaaaattttaaaaacaaaaaaccaatgaactcattgatcagaagctctgatcaacacttacatgtgtacaggtgtccctcattatccaacctcctgctttccaagtccagaatctaaatagatttagataatgtggcattcttcactgttcagacatggtatttgagcacttgctgtttgaatttgggaactgtttagactcagatagtataagattcttgaatttttttaaatggagaaatgaaataattcttaataaatacagtttaatacattattttattcatttgttttatagggacaaggtctcactctgttgctcaggctggagtgcagtggtgctatcctaccttgccacagcttcaatctcctgggctcaagcaaccctcctaccccagcctcaccagtaactagcactacaggtgtgcaccaacacgcctaatttttttttttgagacaaagtcttactctgacgcccaggctggagtgcagtggtgtgatctcggctcgctgcaacctctgcctcccaggttgaagggattctcctctctcatcctcctgagtagctgggattataggcccactgtgcccggccatgcctggctaattttttttttttttttttttgagacaaagtctcgctcttgtcccccaggctggagtgcaatggtgagatctcggctcactgcaacctccgcctcccgggttcaagcgattctcctgcctcagcctcccaagtagctgggattacaggtgcctgccaccacgcctggctaatttttgtattttattttattttttgagacggagtctcgctctgtcacccagcctggagtacagtggcgtgatcttggctcactgcaagctccgcctccagggttcacgacattctcctgcctcagcgtcccaagcagctgggactacaggcgcttgccaccacgcccggctaatttttttttttttgtatttttgtagagacggggtttcactgtgttagccaggatggttttgatctcctgacctcatgatctgcccgcctcggcctcccaaggtgctgggaatacaggtgtgagccaccacacccggcctaatttttgtatttttagtagagacagggtttcactatgttggccaggctggtctcgaactcctgacctcaggtgatccacccacccttggcctcccaaagtgccggaattacaggygtaatcccgtgcccggcccaatgcctggctaatttttaaaacagtttttgtagagatagaggtttcactatgttactcaggcttgaattcctgacctcaagcaaccctcccgcctcagtctcccaaagtgctgggattacaggcatgacccactgcacccagcttattatttaaaatctggtgtccttcataatcgatttggaaaccactgccttaatttttatagtacctccattctcagcataaacagtttttctgtgtgggagaactgtcaagtgccaattctattcagaagccctgattacttggtgaataactttgcatgctcatgctcatattttggcacaaaatttctgtaattcggcttgtttagtcacaggttatacgcatttttaagttttttgtttttttgagtcaaggtctcagtctgttgcccagcctggagtggagtgagtggcacgatcatagctcactgcagcctcgacctcctaggctcaagtgatcctcctgccttagcctccagagtagctgggactataagtgcatgccaccatgcccagctaagttttaatttttttttttgtagacacggggtctcactgtgtttctcaggctggtcccaaacttctggtctcaagtgattctccttccttggcctcccagaatgctgggattgtagtcatgagccaccgtgctccaccaaattgtttttaaatttaaattttattttgaaaaagtaatattcatgtgattcaaaattcaaaagctacaaaaaagtgcacagacagccaggtgcagtggcacacgcctgtaattgcagcactttgggaggccgaggcgggcagatcatgaggccaggartttgagaccagcctgtccaacatggtgaaaccccgtctgtactaaaaatacaaaaattagccatgcgtggtggcgggtgcctgtaatcccagctaatcaggaggctgaggcaggtgaatcactttaaccgggaaggtggaggttgcggtgagctgagaccgtgccattgcactccagtctgggcaacagagcaagactcttgtctcaaaaaaaaagggaaaaaaaaggcacagacaaaagtctgcctctcacctctgacctccagctatgcagttcccttctggggaggtaatttctttcttggtttttttttttttttttttttttttttctgattttctctggttattgggaggcaatttcttgggtttttctacaattatcctatgtgtttacaaacaaatatatacttctcctycagctttcttttttatccagatgatagcatactgtactcactgtttcaatctttcatttttcacctaatggtacatctttttttttttagacagagtcttgctctgtcactaggctggagtgcagtggcacaatcttggctcactgcaacctgtggctcccaagttcaggcgattctcctgcctcagcctcctgagtagctgggattacaggtgcgtgccaccacgcccagctaatttttgtatttttaataattacggggtttcaccatgttggtcaggctggtctcgaactcctgatttcatgatctgtccgcctcggctgcccaaagcactgggattacaggtgtgagccaccgtgtccagcccataatacattttttttttttagacggagttttgctcttgttgcccaggctggagtgcaatggtgccatctcagctcactgcaacctctgcttcccgagttcaagcaattcttctgcctcagcctccctagtagctgggattacaggcatgtgccaccatgcctggctaattttgtatttttagtggagaaggggtttctccatgttggtcaggctggtctcaaactcccgaactcaggtgatccacccacctcagcctcccaaagtgctggtattacaggtgtgagccactgcgcccggccaatacatctttgttttttcaagctaaagtacagacttttttttggatttcaccagttttgtaacaatgtatcttggagattttatggtgtcagttcagaacaagcttcttctttttttttttttttttttkgggagacagagtcttgctccatcactcaggctggagtgcagtggcttgatctcagctcactgcaacctctaccacctgggttcatctcatgtctcagcctcctgagtagctgggattacatgtgcctgctaccacgcttggctaatctttgtatttttagtagagagagggtttcaccatgttgaccaggctggtttctaacttctgatctcaggtgatccgcccgccttgacctcccacagttgggattataggcgtgaaccaccacacccggccccctcattcttttatacacctgcttggtatttcattgtatggacatgccataatctatttgaccattaccctgatgatggacatctaagttgttcccagtatttttgctattatgaataatactgtaatgtatgatggcatttcatatagcatagggagctactttaaaccattttgatcattactccttctggcatttatcttccagatgttaaatattttactaaatactatgcttttactgctgtttcttcttttccttaacgttttttatttagaaaaatttcatgcttacagaaaagttgaagtaatattttgatccctttggaaagaaatattttgttttatctacttttctctctttctgttttttgtaacaaattttgtttcccaggggttggtgccatctacatccgtcgccggccccgtgtgcgtgtggaggccctgcagagtggaggggggcaggagcggggtatgcggtctgggacagtgcccacacccttagtggtggggctgggggctgcgtgtgaggtggcacagcaagagatggaggtatggggagagcagttccctcccacaacttcttcccctgtgctgggtctcctatttagaggcttctcagcatgactgaggcagatctctgcagggagagagggcttaagaaaactcttccttgtcctggtgctgctggcaccttgttctgagggagacattatgggcttcaaaacccatggccttttagtagttatcagctcatttatttctggataagtaaatgaaccctgtgtccagttatcaagcgccttttgcataccaggcactatgctcagtactggagatacagtggtccccatgagtacataggatgataggtggggctgatacatagtcacttccagttataggagaagggcttctcaaactgtctttctgagctggttaatggttactgcctaatccttccttgcctgctccttagtatgaccacaagcgaatctcaaagttgtcagagcggctgatacagaatataatgaagagccttccagatgtggtgatgaatggggaccctaagcaccattatcccggtatggacttgctctttctatcctcattctggtagaggctgagactctgagacctctctcacagtatttctttcctccaggctgtatcaacctctcctttgcatatgtggaaggggaaagtctgctgatggcactgaaggacgttgccttatcctcagggaggtgagctggayggcatagacagggcctgcggcagggccacttagaagagtcatacaggctattaaacttcccagtgtggagatgataggcacaagacctcttgattaagggtaaaggtcattttgtaagtgcctctctttttttggttggctgggtagctgggtacagactgaagtttaccaccctaggaagacttcctggggtagaattttgtgccttttatcgtcccaggggatgtatgtgtctgttgtgggttacactagcagttctgttacaggcctctagaattgaagatgctccaaaggccactaagtgtttggctgcccttcaggctggtgcagatggtgcattacgtcctggggaagtgagcacatggtcctctgctgcgtcttcttgtcaaacccatgtggtatcatgctctgtcacactttgccagcgtccttgcttaaggaagtcatccaccatgggggccagaggagctaggttcacacatcctaggatgtgcaggggagcatcaggtcctttagttctgccagattagaaggtctcttgttttctccagggtatgactccagggccctgggggatgggaacaagactgagggtttgtgactaaaagtagacgttgatgatgaactgaacaaggttcgtgtctctctcctcagtgcctgcacctctgcatccctggagccctcttatgtgcttagagcaattggcactgatgaggatttagcgcactcttctatcaggtcagtgagttgagctgcaacatttatgaaaggcatcctcttatatttttcatctcctgttacagtttttttctttttccaccctgaagtttttctcagtcgagttctccttatctcttctcataaccttgtgaaagtttctrgagcagtggttctcagacttcattgagtatcacctgggaagtttgtgaaatatgatatctgagtcccacattcagatattctgattcactaggtccggaggaggagtagaaaacatctcaggtgattttaatgttggtggtccgtagatcatgttcttttttttttttctgagacagagtcttactctgtcgcccaggctggagtgcagtggcatgatctcagctcactgaagcctctgacttgcaggttcaarcaattctcctgcctcagcctcctgagtagctgggattacagacatgtgccaccaggcccagctaatttttatatttttagtagagacggggtttcaccatgttggccaggctggtctcgaactcccaacctcatgtgatctgtccaccttggcctcccaaactgttggaattacaggcgtgagccaccatgcccggccgatccatataccatgttctgagaaactctgcctaaaggggaaggaccatgttcttctctccatatcttttgtgtcgtagatccttagtgagtatttgcggaatgaatttatcccagtgccagagctctgatggggagccattctcctgtgccttttttcaggtttggaattggccgcttcactacagaggaggaagtggactacacagtggagaaatgcattcagcatgtgaagcgtcttcgagaaatgaggtatacatattgtatcagagacgctttggaagaaactctagcactgtctcccctcttgtccttaggctatgtgtttacactgccaaaaccaaagttcaagcgtacttggatcttaggatttagagattccacaaagcaagaaagtagatcttcttggctacttgtcttcacaatgagaaagtgtttttaaaaactaaagaactaggccgggcagggtggcccatgcctgtaatcctagcactttgggaagccgaggcggacagatcacctgaggtcagaagttcgagaccagcctgaccaacatggagaaaccccgtctctactaaaatacaaaaaaattagccgggagtggtggcgcatccctataatcccagctacttgggagactgaggcaggagaatcacttcaacctgggagggggaggttgcgttgagccaagattgtaccattgcattgcagcctgagcaacaagagccaaactccgtcccaaaaaaaaaagccgggcacagtggctcacacctgtaatcccagcactctgggaggctgaggtgggtggatcacaaggtcaggagatcgagaccatcctggctaacacgttgaaaccccgtctctcctaaaaatacaaaaaaattagctgggcgtggtggcgggcacctgtagtcccagctactcgggaggtgaggcaggagaatggcgtgaacctgggaggtggagcttgcagtgagccgagatcacaccactgcactccagcctgggtgacagagtgagactccgtctcaagaaaacaaaaacaaaaacaaaaacaacaaactaaagaactagatgaatgcaggtaatgcaggtagtagttttttttttttttttggagacaagttcttgctctgttattcaggctggagtgcagtggcacaatcacacctcactgcaacttgtgcctcccaagctcaagtgatcctcccacctcagcctcccaagtagctggtactacaggcatgtgccactatgcctggttagtttttgtattttttgtagagacggagttttgctatgttgcccaggctggtctcaaactcccgggctcaagcagtcctcctgtcttggcctcccaaagtgctgggattacaggcacaagccaccgcacctggcccaggtagtattgttcattatgattattattatctttagagaaagtgtctcattctgtcacccaggctggagtgcagtggcacagttgtagttcactgtaactttggactcttgggctcaagttatcctcctgcytcagactcccaagtagctaggactacagctgtgtgcccccacacctagctaattttaaaaatatattttctgtggctgggcacggtggctcacgcctgtaatcccagcacttcgggaggccgaggtgagcggatcatgaggtcaggagatcaagaccatcctggctaacacaatgaaaccccgtctctactaagaatacaaaaaaattagcctggcatggtgggcacctgtagtcccagttacttgggaggctgaggcaggagaatggcgtgaacccaggaggcagagcttgcagtgagctgagatcgcaccactgctctccagcctgggcgacagagcaagactctgtctcaatcaatcaatcaatgtgtttataaaggtaatgagatccttggccagtcagctggcaccagggcttcccctagtagccacagagctcatcttcctcctggaaccttgaggcctctagattttttcagagcctggctctgtcttggttaaccttgactttcaggattctcttgatctagttggtagagagaggaatttcaggtatatactctgcttccctttatgagctctcccaggcctttctgtgttctggatttttctttgtagggtctagctgtattgcttaagtgtctatagcttgctcaactgcaggacccttcctttgtcctcactttctggtattctgtggtatactcacaaggcatttctactgaccacgtggccagcaaagccttttgtttcctatctatgtggcttcggcatctgcaccctattccttctgaccctttacaaactgaatgcagcctggtcctattagctctcagagtcttattttgtgagcctataataataagtggtcttccctaaagaggaaggacaggaaggagatggctaactttaagggccatggaaaatctcatgaatagaaaggcattctgggaatgtttagtatatagaagagggacaagtcaagaatataatgaaatttgataaaattacctggtgaaatctaaactgtaaaatcccatattcatagcacactgaagtaatatctggtctgggaacattatccaagatatccaagcttctgcttggggatcgatcagagcttagcagagatttcttagcagcagctcttgtgtgagatgggatgctcaggtctaagatccaaggaattcttttggattagacccagggatattggaagcacaggccaactctggggagatgaaacgggcaagaactgggtaagggtacagcataccaagatgatgtagggttaagttccacccctaactgggaactagaacaaaaccaagaaacaaatgctgaaaagcgggtaatatgtggtgggctgaaacgagctgcttatacatgtcatatgaagagaggcttaaactagatgtttatacaagtctcaagggtcttggttcctccaagggaaaccatggccatagcctcttaccagtgggatgaaagcttcaagaatatgaccatgtttggtgtccattggctcagggccccactgcaattgagcctgaggaacctagttattcctgttagcagttggggagagctctcaggagagytgacaaggacttacagggagctggagagctcaggataccttaaccacctgtgttagggtctaccagggcaagaggcagaggacagacagggacagaaggaggcaagccattgctcagagccttggggccaakgttgtcgacttcctatctaagccctcactcatttaatgcctcttctctttggcagccctctctgggagatggttcaggatggcattgacctcaagagcatcaagtggacccaacactagaagaatagggccctgactttgtgctggtctggcccctcctgcctcaccaacccgtgcacaaccagacaccttgttacacctagtggatgctctagattggtatagaccagttgacttcagcatcagtccacctctatgacagaaacacaagaaaactgtctttccctagcttcagttccttgggtgtggagcrctccccatttcttctcgggtcttaaagtgtgtggacattttcatcccgaagccatagagacatttgctgtcatattgctgctgggcacatctgtgctcttggtgaggagagcaagaggaaccagaagaagtctctttggtcagggaccatgatgctctacatggacatttgagtcttcgtcttctgctgctgctcggctggaccagcttctttaacagcaagcataatccacttcaatgtaatattttctgtagctccaaaggctatctcttcatattgactgcagacagactgaatggacagtttcttagagggcttgtctcctttctacccttgtcctctttcctttcctttgacctaatggagctagaaatatgtctgtgactccaccagttattctaataatttgttttcttgaaaattgttaatttcaagactggagaaataaactcaccttctatttactctgtgactttatgagaggttgagggaaaagtggaagctgtacttgggaattgtggagaagaccgccactccatctgatttgcataaatgactcagtgggcttttgtatctcttcatttaagaattatttgaatgcctgccaggagccagatttgttctgggtattaggaatacactggttaacaggaccaaaaaagaccctgccctcactgagttttaaattttagtggagagatggaaaataattaaacaaataaacaatgttatagattgtgataagtgctatgaaagaattaagtggtaagaggacatagcagggaaaacctaccatgctgggtgtttgaggaaagtttttctgaggaggtagtgcttataaatatgaagagctcgctaatctagaaatgagaggtgagaaggaatggcaagagctaagggcctgaagtgtgataaagcacaaagtattatactttagaaaccaagagaaggccattgtaactagagcttttcatttgtgggtctgaacccataggtgggtagttaccagtacttaaaaaaggagatagtatgttagagtacatttatgcatattttaagaatatattttgatgatatatttgaatttgtataccaggttataaatgtatttcttattgtggataatggtcaaaaaagtttaattgcttttcatacttgccagtagcagggggacaggaaagtttgaaagccactgggctaaagtttggtaaatgtagatggacagtggaaggaggagatgaaattatagaatttttcttgttgaaaaatatcttttttacttagaataattttagatttactgaaaagttgcaaagatagtagagttgtagatctattaccagttttcctctaattaaaaagtcttacataaaactatgctaatttggctgggtgtggtgggtcacacctgtaatcccagtactttgggaggcgaaggtggatggattgcttgagctcaggaattcaagactagcctgggcaacatggcaaaacctttactctacaaaaaaatacaaaaattatctaggcgtggtggtgcccacctgtagtccaagctatttgggaggctgaggtgggaggatcgcttcagcccgtgagatcaaggttgcagtgagccttgatcgcaccactgtattcaagcctgagcgacagagtgagaccctgtctcaaaaacaacaataggctgggtgctgtggctcatgcctgtaatcccagaactttgggaggctgaggtaggcagatcacgtgaggtcaggagtttgagaccagcctggccaacatggcgaaaccctgtctctactaaaaatacaaaaattagctgggcatggtggtgggtgcctgtaatcccagccacttgggaggctgaggcacaagaatagcttgaaccctggaggcagaagtagcagtgagccgaggtggcagtgagccgggatggtgccaccacactccagcctaagcaacagagcaagactccgtctcaaaaaacaaggccaggcgcggtggctcatgcctgtaatcccagcactttgggaggcggagggaggtggatcacgaggtcaggagatggaaaccatcctggctaacacggtgaaacccccgtctctactaaaaatacaaaaaattagccgggcgtggtgtcacgcacctgtagtcccagctacttgggaggctgaggcaggagaattgcttgaacctggaggtggaggttgcagttagctgagattgtgccactgcactccagcctagatgacagagtgagactctgtctcaaaaaaaaaaaaaaaaaacaacaaaagaaaactatggtacatttgtcaaaacttagaggttaacattggtatattagtattaatgaaacgtgattttctaaaattattaaagatttttttatagagactgggcctgtgttgctcaggctggtcttgaagcaatcctcttgcctcttggcctcccaaaatgctgggattacaggtgtgaggcactatgcccggcctaaacttcagattttattcagctttcaccagttttcctgtcttttttctgttccaggatccaaccctggatgctacattgcatttagtaggttttgtttttaatggactatgttttacctacacagagcaaacctataaaaacctataaagcataggtttagtttaacagtgtggcctggttttccaacttgctgtttttggcatactgggctagcaccagtccagtctgccatagaaatcccgaaaggttgttggaattgtgataatttcaaccttttttttcttttttttaagtgatagggtcttgctcttgttacctgagctaaagtgcagtgatgcaatcatagctcactgcagcctcggactcctgggctcaagggatcctcctgcctctaactcccgagtagctaggactacagacttaagccaccacatccagcttttaattagcaggggcatgaagttcggggggctaggcccaaagcggcttgagaacagctttctttttttttttttttgagatgtagtctcgctctcctgatggtctccatcccctgacctcgtgatcctcccacctcggcttcccaaagtgctgggattacaggcgtaagccaccacgcccagccagagaatagctttttctataataaaataatactatagtgaagccgtggaggggtcacgatggatttaattttttttttttttttgagacggaatcttgctctgtcgcctaggctggagtgctatggcgttatcttggctcactgtaaccgccacctcccggattcaggcgattctcctgcctcagccaccctggtagctgggaccacaggcgccagccagcacgcccagctaatgtttgtatttttagtagagacgaggtttcgccatgttggccatgctggtcttgaacccctgacctcaggtaatccgcccgcctcggcttcccaaaatgctgggattacaggcgtgagccactgcgccctgccctagattaaaactctttttttgtttttttttctgagacgaagtttcgcttttgtcatccagggtggagtgcaatggcgccatctgggctcactgcaacctccacctcccgggttcaagcgattctcctgcctcagcctcccaagtagctgggaccacaagcaccgccaccacacccagctagtttttgtatttttagtagaggctgggttttgccttgttggccagaccggtctcgaactcctgacctcatgatccgcccttctcggactcccaaagtgctgggattataggcgtgagccaccgcgctcggcctgtataaactttttttttttttttttttttttttgagatggagtcttgctctttcgcccaggccggagtgcagtggcgcaatctcggctcactgcaagctccgcctcccaggttcacgctattctcctgcctcagcctcccgagtagctgggactacaggtgcccgccaccacgcccggctaattttttgtattttttagaagagacggggtttcaccgtgttagccaggatggtctcgatctcccgacctcgtgatccgcccgcctcggcctcccaaagtgctgggattacaggcgtgagccaccgcgcccggcccccggcctgtataaactcttaaatgggaaaaaagaatcaggttttggctgttttgtcaggatataataactagccaccacgttgtggtccatttaatcctcaaaaaacttagaggtaagcacaattcgctccttccgcggaaactggaagacgtgaagcaatttgcacagtcttgcagtgaagggccaagctagacactcatacccagcccacccgccagggccactagcccaaggtcggtcctgtgcgccaacagtcgcaagcagggactgaatatccccctcttagcacaaaacccagtaacttccgggagatcgcccgagaccgtcagcgcgcttgcgcggccccttgacgtcaaccacgccgttcctcccccttctggaacgcggagccgctgagcgggccgacggccattttgtgaagcggcgaaggaggtggtggctgcgttgggctccgggaagccgttcgggctggggctgtcggccgcggggcggaggcactcgcgcggggggtaattcggggtctgggttctggtgccgcgcagctttccccggtaagactcccgcagcccctgaacgggyggggctgtgcggggctcgtggtgccccttggtggcccggggcggggccttcggaggccttcgagcccgcggcaactagcgccccacacaaagggtcgaggcagggctgcagggggagtgggatgccacttaggcctctgagatctgagaggatgcaaggaggacgcaagaggatgagcctgcgtaccgaagtggggacgaggccatagcgaggactcccccgtggtctgagagggggcaggccagagctggctggctcagcggcctgcgagctaacggggactgcagtaaaaacacgcctacatcccgagtacggaggatttcttgtctcccccagtgaagcagaggttataactacatctctgtgcctggaggtggggagataatcgtagtgaggacactccttcaacccgaaatggaaaggaggcctttgtggcctaccagcaaaaggggacccaggtcacacctgtggggaggaagctgtagtcggtacactcctgtgagttcagaaaggaagtgtcacaaccggccgccttcgtggcctgaaggtggaggggtttgcagtgaaatgcctccgaggtccattgctggggaggggctttactcgagggtgtagcagttttgagaagccggcgtctgaagctaggaggtgagggggtggggtgagtacgcctcctgaggctctgagaattgtagtaagatgccaggcctttggtcccccagtagggaaggggctgctgtgagcagcacatttacggctccctcgggagaggatcctgtggcatttcaggaggacgagatccagtgggctgcggagggtgggtgcttttgatggagagttaattgagtttctctgaagcttggctgcattagtttgcagccacgtgaattgggtggtgggagggactttgaggatctacaggttagtgacggggttggacgccagtgcagcaggcttagctgctaggttgtaaacgtacgggctttttgtgtgcctccaacgtgtgctttatagtgacaaatctgaggggctcttgtgagggttactcagtattaagtgctaaacatttactcatctgcgtggtgtcatgctgagaattgcagactttaagagatttctgggccctaaaaccctccttggctccaggattctcagagataacctaatataaattgaagaagttggtagggaccgttttatattattcaataatagagtcagtataacccactggaaaaaagtgtgatggcaactgaaggtttgttgaagggagaggctaggcttgtgactgcagtattttagagcttcttgcttgaatggtttgaaatggtgtaatttttgcaaaatgcagtcttagcaacaagaattgtctgggaccttgttaactagtgtatattgttaatgcatctcagagcatttgcagtcgagaaaaatccctcaagtctggacacatagggaaatcttgttttttaaattatagaactacaatacaagactggttgtacttgtttttgaaatttggcagttttgataagaatggaggatttctggatttagtggaaagtgtgcagacattttcaaagagtataaaaagttgggaagaactgttacaggtggttcaaataacgttatggtaatttatgaagaaagtgaaatgtttggcgtgtttatacaaaacaatgaagatgtgcttagtatatattattggacagatttttaatgaaacagggaatacatttttatatatgctcgattaaatgtgattactttgcttatggattgtaatgtataattttcattttctttatgttcaaatctgttagatgaaaaatgtgaagctttagaaataattgtgtggttacttgcaacgtattgttacatgctaataccagtactctttgggcttctttcaccttctttgacacgtcaaatgttttgatgattgagtattgagagtttgggagttgttagtacagtctttaggtgtgaaacttgatgttgtgggccagtgtgttccaggtgctggaatccagtgacagtgtty

SEQ ID NO: 95753 - DNA, 14574 bp, Homo sapiens
tgaccccctatctggatctgacacctgaatcagcaccccaggaaaaacgaatgtacttggtaccacagcattgcgactgcccttggttcagttccgggaagtgtggctgcccttctgagaccctcaactgctcctcctgccaccacacagccgacgaatggaactggcttgatgcgtgctccaggaagactatggggtacctgatgaggacaagagagtctatgacctctgacactgtgctctggtggttggtcagtggtcaacactgggcccggccatatcccccatgctttccgggcctcacccatctcccactttccgcccaaatccctgcccttggccctgtcttcacagcctctggatggagatctcacccacccagctctgttttctctcccctgggcccagcccccaatctccctcttgctgtttccagggcatgaactcagggagcgagcttgggaaattgtggaggaagctgtttaaagggattcccaggctctcggtgagccattttgatttctattgtgggacttgtgtgctgttggggcgcccacagatcccgcagggctccagccttggcaacgacatcgaccaataccccgtggttttcaggtgggtgctggggagagggcgggagcaggaaggccaggcctgccccacagttccatcagtttctgctccccttcccaagatgaagcaggccccaagtccagggctttgagatggacgtggggaaccaaaccacacacaatgcttcatctatcccaggaatgccagcgaccagggctcctggatgcagctggagatgctactgcggaagctctctgacctggtgtggacttcagatgctctaagtgataaggtgatggaggtgtccccagacattctctgtgtgggggtgaggggaggtcactgcagggagtaacagcaggggctctgggaagaccttctattggcttactggggacacttgcaggactttcccaggtcttgtggcccaaactcccccacctccaattctttctcagattttggaagatggtctggttccctagtggagtggaagatagcaaagacacggtgagggggaataggaaaaggggtaggatgtggctgtgggttgctgtgggaagggccccaggtcagttccctcccccttcctccccaggtgcaaccaggacaactggctgtcttaccagggtcagggtcatccctggggcccaaggctttgttctgtgtcttgcacaactgtgccccggcaggaaagattcttgtatcttcttctcttaaaattcctgctcctcaatgccttcagcatggagtctaaagttttctgcctggctttcaagactctacatgtaggccaagcatggtggctcatgcctgtatcccaacactttgggaggctgaggcgggtggatcatgaggtcaggagttcgagaccagcctggccaatatggtcaaactccatctctactaaaaatacaaaaaatagccaggcatggtggtagcctcatctctactaaaaatgcaaaaaatagccaggcatgcctgtagtcccagctactcgggaggctgaggtagaagaatcgcttgaacccgggaggcagaggttgcagttagccgagattgcgccactgcactccagcctggtgacagagcgagactccatctcagaaaaaaaaaaagactatacatgttctgactcctccccttgcctcctgtctcccaggctcccataatgggctcttagaattccccagacacatgagctgcctcatgccttctctcgcaccattccgtttgcctggaatgcccttctcttacgtcctgggggttcccctctcttcctccaataccatgaggaaaagcgagttgacattctcttttttgggatcctcagtgactctaggagagtgtccagagtctgtttcctggaggtgagctccagtctcctcccagctcccagggacaacctgtcatcctagatgctgagtgaagggaggcaggggtgaggacaggagtctgcctgctgacgcacatgtccctctcttatccactaggtcaccctctttggatttggatcagaatagcaaggaaagtgtttctatcactggaaggaggataatcagaccaagggctccaaggaaatactgcccacgtctagtgcaggagcagaaatcgaagtcatccatcagctagcgtgtggacaagctcactattcacacaagctcagcctagctgagtccatacaaatcctatttctgggtgggtaaagggcaggaggaaattgtaagatcagtctggtactgaataaaatcctggcctgattgtcttacctgtaaccacagtgtctgggagggatgggccagaggtgccttccagatctcaggggcaatatttgagttgatttctttgcctagtgccctggatcatgtaggaggtataagtttagattcaatttcatgccaagtgcaaacccagactttgagttgttgggggaggctctttacccacttcgataaaagaagtaaacctccttgtttcacccatgccggagggtgagggttgttttttgttttttgtttttttgcccagcttttcacagaaggtttagcattttgaggttcccagtttttttaggtgcctcagttccaattcgtttttttttttttttttttttttgagacaagagtttgctgtgttgcccaggctggaatggagtggcacaatcatggcttattgcagcctcgacctcctgggctcaagtgatcctcccacctaagccccctgagtagctgggactataaatgcatgtcaccacacccagttaattttaatttttgtttttgtagaaagggggtcttgccatgttggccaggatggccttgaactcctaggctcaagcaatcctactgccttggcctcccaaagtgctgggattacaggtgtgagtcactgtgcctagcacttaccgtgtcacttctgcagcattccattggtcagatcaagtcataaagtgatccaagatccaagaagtggggaaatgaactgctcttcctaatggaaagagctgaagagaatctgccataatgagactaccacagtgtcaagggcccagttgtgttggcagcagtggtggcattcctggtgggccattcctggggtagtctttggccatgttttgcatctcatgatagactgagcctggttctctagcttttgcatcatcctgtaaactactaaatatttagccggcgaattgtttttctctgaagtttaccagtctgttgaccaagaccaagaatccaactgctacagttaacaaagaataaaaaatcagacttttggctgggcacagtggctcagacccagcatgttgcgaggctgaggcaggaggactgcttgtgcctggaaaatttctgcataattcaccccttaatttgcatgtagttaaaagtgggtataaataggattgcagagctgctgctgagctgctaactctgggcacactgcctatggggtagccctgtccacaagaagcagtgtacctctgctgctgctgtgcaatgctgcttcaatacagtttgctaacaccactggatcgcatcagggcaaagccaagaaccctctcaggctaagccccaattttggggattgcctgccctgcatcagaggcatcactccagtctctacctccaacttcacatggcatactcccctgtgtcttctgtttccaaatttccctcatctttttttttgagatggagtcttgctcttgtcacccaggctggagtgcagtggcatgatctcagctcactgcaacctctgcctcccaggttcaagcaattctcctgcctcagcctctcgagtagctgggattacaggtgcccgccactacgcctggctaattttttgtattttagtagagactgggtttcgccatgttggccaggctggtctcaaactcctggcctcaagtgacctgcctgccttggcctcccaaaatgctgggattacaggcatgggtcatcacgcccggccaatttccctcatcttataaacacactagtcattggattagggcccattctcatccagcatgatctcattttaatttcattgtatctgcaaaggccctacttccaaataaggtcacatttataagtatcaggggtgagaacataaagattttttttttttaaagtaacacaattctacctcctgcaagcagaataatggcgtttctagacatgcaaacttagaatgttttatctcctacacaccctttcttagaaagttaccacgaacaaaaggccgggcacagtggatcatgcctataatcccagcactttgggaggccaaggtgggtggatcacctgaggtcaggagttcgagaccagcctgactgatatgatgaaaccccgtctctactaaaaatacaaaaattagccaggcatggtggtgcacgcctgtaatcccagctactcaggaggctgagacaggagaattgcttgaacccgggaggcagaggttgcagtgagccgagatcatgccattgcactccagcctgggcaacaagagcaaaattctgtctcaaaaaaaaaaaaaaaattatcatgaacaaaaaaaggtagtcttagttcatttacaaactctataggaaatatttatctagttacaataatgtaaacactaatagtagattgttgacttttagaattaaattagcctgtatttctgtaccatccaatatgatggatgagcacttgaaatgcggcaaatgcaagtgaggaaggaatttttaaatttattttaattaatctaaatttcaaaacaattcagttcttagaaaacttttcactatgcttattgtaacttgggtatgtaaatcttttttgactgtaaaattttatgaaatttataaatcatgtatttctgacaaaacgctttgaatttagatacactataagtgtaagatatacactggattggccgggcgcagtggctcaaacctgtaatcccagcactttgggaggcagaggcaggcagatcacttgagctcaggagtttgagaccagcctggccaacatggtgaaaccccgtctctgctaaaagtaaaaaaaaaattagccgggcacagtggtgtgcacctgcagtcccagctacttgggagactgaagcaagagaaccatttgaacccaggaggcgggggttgcagtgagccaagatctgggcaacagagcaagattccatctcaaaaaaacaaacaaacaaaaaacacaaaaaaacagttcttaaaaagaaaaagtcgacccctgagaggtgttaagggctaaaggtatcaaatattctctttcatcagtatagtaaattctcttcagaagattccaggtggcccttcttgaactcacgggctcaagtgatcctcctgccttggcctcccaaagctctgagattacaggtgtgagccatcgccaaggtggcccttctgtttccctctttgcctcctgctcacccaccccagcctggatacaacctctccctctgtgccctcctgtcccctggacccttgactaccacacctccctggtcatctgggcactgggctgaatgccaaggtgaaggaggggccttggtggagtaggtcacaacgtggcctctgtgatgagtccctgatatcactgggctggcacagaagaccccattaggaatcagtttcctcagggaggccacagaacacaaaaagtgtcctctctccctttctttctgcctctaggccaggctttggcagttccagtagtgatcagtaggtggccagggaggcaggagcgaggttttgggaggaggtgtaatgtcaagggttgggagagggatggaagccattaagatgggggatgctggggacttctgtggccccagcctcttcttcccggtgccaggtgtcggggccaatctactgtctgccaggggcaccatcatcagggccagagatcatgattcgatacaggagtttgggcctggtggctgcctatgtcctttcattgtggctgatcacctccttcctacaccagcactccagccagaaggacctccgtaatatggccaagatacacccaggaatctgccaccatcccagcaacttttccagaaaatgcaactgctcatctgaggtccacacatgctctgcctgcctccacgtgcctggcgagtctgactggtttgacagacgcttcgacagtaccgttgaacccctacagaggccacaagatcccacgtccaatgatgctctgatattgtggctggtcagtgcgcaaacttggtctttgtccagtccctgacccaaccccaggtcctagccatctctccatcaaggccccaggctctaaccttcttccacaggtaggtggaacctgggtcaagcccctaaattcttccctcctatgctcctagggactcgagagggtcaagtcagagaaggaggttgagaataagcagcagcagctgattaaagcacctcccctgtgcccactgggccatgtggtgtccaactgccgggtctgtgcagtggtgggaaactcaaggtctctatggagctctggccttggcttcaggattaatcaacatgaagtggtcctcaggtgggtgcagggtaggaggtggagacgaagaccaagccgaagccttttcctcctctaaatgaccatcctaacttccttttcaggatgaaccaggcccctgtctgaggctttgaggcagatgtggggaacaggaccaccatgcgcgttatgtaccctgggattgccagccctcaggaccccggtacccaactgctgctgcttccgttgaattcatctggtctggagtggttcataagtgtactgcataaacagacaagcatgtggaagcaaaaaaaaccctgggtatgtcagggagtgaggtcactgtagggagtgacagaggtaactccaaagagaccctggctggatactggggcacccccaaggcttacttaaggctgaagtctgcttgtcaaatgactctgaaatcctcccaaacctcaatttctttttagatttcagacggttcaggttcctggtggaaccgaagacagcaaagataaggtgagggtcccaggaaggaaaggggaaagtggtaggacaacatgatagtgggtagccatgggacaggcttcaggtcagtccctttctccatcttcctaggtgctggtgatcagcctctacttcctcaggtatatccaggaaagttggctggagaaccatggtcagtatccgtccttggagtttgtggctctgttgtatgccttgcatacctgtgaccaggtaagatatctcctgcaactcacggactttcactcctctgccactcaaaatttctgtcttcttggctgggcatgggggctyacrcctgtaatccctgcactttgggaggctgaggcgggctgatcacctgaggtcaggagttcgagaccagcctgaccaacatggagaaacgccgtctctactaaaaatacaaaattagccaggcgtggtggcgcatgcctgtaatcctagctacttgggaggctgaggcaagaaaatcgcttgaacctgggaggcggaggttgcggtgagccaagatcatgccactgtactccagcctgggcaacaagagcaaaactccatctcaaaaaaaaaaaaaaaatctgtcttccyaaggacttcccgttaaatctaaaactttctgcctagctttcaacaccctacatgatctgacccctctcctctctccctctcctctctcccagattcccgcactggacttcttggggttctccaaacataccagctgcctcacgccttctcacamcttgctccctctgcctggaatgcccttcccttgtctcccaggggaatcctctcttctctcaatatataatgaagaacaactagttggtgctctcttttctgggctctggggtcactatgagtatttagagtctgtcttccttgaagaaggtgaactccattctcctcccagctccaagaggaagcctggcacactagtggttgagtgagtggtgctgaaggcatgataggtgttccatgggggcagggcaggatccagcccgttacaccaccaccatcttttgtcttatccaatctctcaggtatccttgtttggttttggggaagacaattgcaaaaggtggtcccattactgggatgacaaatattggtttgagaacaccatgcaaaatttcccagcagaataccagatcatcttgaaactgcagtgtgagaggaagattgctgtctacggctgagatgtttccagtggagtccccaggaggcttgacaggtagccaaggggaccttgtggtgtcagagagggactagggcttcaagcagaccctggatggagattactctgctactgaataaaaccctagcttatttctctctctggatttctggtggcattaaagggctacattctattactgattctgtcttatcaccatgtgactctcttatgytgtatcttaccaaaaaataaaattaaatgagaaaaaagtgaaccctgaagttgaaaacacatcaaatggacctaactatatttaattgataatataaacaccagagaaataattatttcaagttccttaaactcaacaccttgattgtatattctttgtaggatagtctctgtggacaaaaagaactaagaagaaattttaggccaggcgcgatggctcacacttgtaaccccagcactttgggaggccaaggcgggcagattatgaggtcaggaggtcaagaccagcatgaccaacatggtgaaaccccatctctactaaaaatacaaaaattagctaggcatggcggtgtgtgcctgtaatcccagctactcaggaggctgaggcaggggaatcgcttgaacctgggaggtggaggttgcagtagccgagatcgcaccactgcactccagcctcggcgacagagtgacactctgtctcaaaaaaaaaaatttttttttaaacttgactcagtattttcattatagtgctggtattattattattatttagagacagagtctcactctgtcacccaggatagagtgcactggcatgatcacggctcactgcaacctctgcctcctaggctcaggtgatccttccatatcagccttctgaatggttggcactattggtgcgtgccaccaccctcagctaatttttaaattttcttgtagagttgaggtctcactatattgcccaggctggtcttgaataagtaaataactacttatattaacaacattagaaactagacacaggccaggtgtggtggctcacgcctgtaatgccagcactttgggaggccaagggaggtggatcacttgaggtcaggagttcaagaccagcctggccaacatagtgaaactccatctctactaaaaatacaaaaatttgccaggtgtggtggaggctgcctgtaatcacagctacttgggaggctgaagtaggagaatcacttgagtctgggaggcagaggttgcagtgagctaagatcgcactattgtactccagcctaggtgacaaagtgagacttcatctcaaaaaaaaaaaaaaaaaaaagaaacaatacaaaattgggcaggtggacaggctaaaaactctgtgacattaaattcaatctggaattttttttttttttttttttttttttgagacagtgtcactctgtcgcccaggctggagtgcagtggcgcgatctcggctcactgcaacctccgcctcccgagttcaagtgattctcctgtttcaacctcctgagtagctgagattacaggcgcgcaccaccacgcccggctaatttttgtatttttagtacagacagggattcaccatgttggtcaggctggtctcgaactcctgaccttgtgatccacccacctcagcctcccaaagtgctgcgattacaggcatgagccaccgtggtcggcccaaactggaaatattatgaactcgattttcaaactttttattgtgacaaaataatacacaaaatttaccatttaaaagttatcaatggcaataaagttcagtggcattaagtatgttcacattgttgtgcaatcataacctcattgaactaacagtttacaaagtacattttctccctctgtcatctgaacagccataacactccattagcaacgatcagccctgcaatccagattatgttttttgtttttcgtattttttttttttttgagacggagtcttgctctgccacccaggctggagtgcagtgacgcgatctcagctcactgcaacctctgcctcctgggttcaagcaattctcctgcctcagcctcctgagtagctgggactacaaggtgcacaccgccacccccggctaattttttgtattttagtagagacggggtttcaccatgttgcccaggctggtctccaactcctgagctcaggcaatccgcctgcctcagcctcccacaagtgctaggattacaggcgtgagccactgcactcagcctgatttttgtcttctaaatactttttcttcactaaaagattctaggcctagacaagtacaagaacacttggacattagatttgcggcaatttgagcatcaaaaatagcaactgtcatgattgaatcatagtgaatatataaaaaactttgagctcataatgatactcaaagagaaagggaaaactggcggtggctattacctcaaccccttactctgaaaattggtaattaaaggtgtgtgttgagggagcatttatcctgcctttttggtagaaacagtagttcagggtaaccaaatagcctcagtaaatgagtttccagttactgtgtatctaaaacaaatatccaccgcatgctacccccttggctgctcaactaccacacacaacctaacaaaatgcaaatatcccacataaaccgacatccctgacacattgtggtgcaccaggtgtctaggaatgaggtagctcagagtcaggatccgagaatccccaaaggtgtaggtagtgcggcctcgtgtccagatactggacccgttatggcaccacatagacaagttactattttagaggaataaagtgagccagtagaaaaacatagtcaaaaaaaaaaaaaacccgctgcctctgaagaggagtttgagaagaatgaggtgggaaactgctatcttctttttatttaatttcctttttttttttttttgagacagtcttgctctgttgcccaggctggagtgagtgcagtgacatgatcatggttcactgcaaccttgacctccctgggctcaggtgatcctcccacctcagcctcccgagtagctgggactacaggcacatcatcacactgagctaatttttatattttttcgcttaggatggtcttgaattcctgagcccaagcaatctgcctgcctgggcctcccaaagtgctgggattacaggcgtgagcccccaagcccggcactgtttaacttctttaattttttttttttttttgagacagggtctcacttttatcactcaggctggagtgcagtggtatgatctcggctcactgcagccttgaccttccaggttcaagcgatcctcctgcctcagcctcccaagtagctgggactacaggcacgcaccatcattcctagctaaaatgtcttaaccacgtacatgcacttgtttcattttaaatagatgacaagaaagtctaccaaagaaaaaagtttggatgcatgggaaatttatttttaaccctcttacattttcctatagattctatcctcaagaggaaccaaaaagctcttgcttttctctccctgcctccagcttgacaaccctacactgtgaataggcagctcctctctcagatatacaacatgccagctttggcacagggtggtgccccttttcattcttatctccatcacccttgattgccaagccttcccttggcagctggaccctgggctgaacgccaagatgaaggactctattgggcatcgaccccttaatcaaccccagggaggacacaggacacattgaatgccacctctcctcttagctttcagcccagcctttagcagggcacccttgaggactgaataggtccagagggaggcaggagctaaggtgctggaaggaggtgttctgcggacggttgaggaagggatggaggccaacaggagaggggaatgtagagtctgtgaccatggcttcccacttttctcagtgcccggtgtctgagtcagcatgccacttgccatgtgctctgccctgtgggacaagaatgtagccttcaatgggggggtttgagcttatgctcacctgtggctgacgtttctgccgtctgctcagaggtctaacctgaatgaatggataacacctgccattgcttctggatgtacccctggactccacacaacccgtgcatccaactggcttgacactttgaaagggccttcaagccctctctttgtccaagatgctctgtttgactctccctggcctcactgagagcagccagtgggtctcttctgcacaactgggtcattctgcaaactttcatctgtgtccaggttctgtgtgcctagaggtgagctccttctcagagctccctgtggagctttgtttaaatgagtatttgccaaatgactgaatagctggggcaggagcagcagctagccaatctcattcaccaggtaatggagtcaggcagacaaacttcagatggcccttatacagggaagagagttatagccaaaggctccagcatgaatcatcaaaccacatacaacagcagaagccgaggccatcagtcagctagaatgtgagactactcctggccagcaatctgacctgcagggctggaatgttcatagatacgggagaggttttgataggaaaccaagacaggaggtgcaagggcaatgtgtggattattaatctggccttccctgattccctcacctgaacaactggtagtaattaagaaagaatcacatttgaatatgaattctcgtccccctccctggctctaaataaatggccatgtgctgggaataggggttacccactctctcagatgacacatcacacagccttggcagagactcatctctcctcctacccctgacccattcaattattttacctccaagcccatccacctgagccaaggttcaggccctataagggcatatatagagctggtagtattgccaatgaaaggctaagaagaggtcagagtgtccaccctgtgaccaggctactgatgtaatgagttgggtgagatcaactggccaggagcacagtccaacgaagtctcacctctcatcctcacctccagcagggtagagggagtaaaagggcctcaggaccccatgtttttgcccttcatcctcccttgcctgcttcttaagtgtggtgagcagagttgagcttgcactcctcctcagctgtgcccagaatcatgtggagggctctcttggtttggagcacactggcagctcttgcttcttcctcttccctgcccctgtcccctggccccattcccccgctctgcagagtactgggtcagaaggcaggaggtgaggtattgcagggtggacagctgaaggtatcatctaccccaaggccaaactaaaaaaaccaggaatctgtcccatgggctgagatgaggcctgcaggcaaagcctcaggcctggaagtcagctcactgcttttgtggctggggtttcccaccccacaggtacttctagaagttctgccactggccccagagctgcagaggttctgtggctgctcaattcagccccgcatctacaaagcctgccttcaccagcatggtgtgtctgcctggtttgatcagcacttcagatgggccctgaagccccgatgcaactggagaccacgccatctccagaggccggtggatgctcggtcctgggctctgggctgcatcctcttcttgatcccttcctccgctgggcctccagttgcaatggctccagcctttccttggtactggaaccaggggtgagtgataaacagtctgtgttcttctccataggcaccaatgctaggacacctaacccaattccggctggtcaagaagctactccaaccgatccccaggtcacagctagaccccgagctccgactctgccagtcctgggccatgcgtatttggaatataggataaccatcactgagcaccacactgtgctcaggtgggggcagaagggtgagggtgggaagcagcaccactctgtgagccccagtgccttcctatctctgtagaataaaacagggcctattctgggctttaagaataacgtggacaacagaactcccctgcacttaaagcaccccgaatactcatggcctgcatgagaacacccacatgctgtgggtgtcgaagcctccagacctagtgtggactgcaatggttttatcaggcggtatgaccagtgggggccccagacctggcgcagacagcctttggcactttggtg

SEQ ID NO: 95754 - DNA, 71209 bp, Homo sapiens
  misc_feature (1)...(71209): n = A,T,C or G
gaaaaatacttatgaacaaatatagccaaggaagtgaaagagctgtatattgaaaatcataaaacattgatgaaagaacttgaagacacaaataaaaagaaagatattccatgttcatggattgaaacaatattgttaaaatgtccatactaccaaaagtgatctacagattgaatgcaatccctatcaaaatcccaatgacacttttcaaagaaatagattaaaagtcataaaatttttattgtaccacaaaaccccaaatatctaaaacatttttgaggaaaatgaacaaaatggaggcatcatacttcctgacttcaaaatatattacaaatctacagtaatcaaaacagcatggtactgctataaaaacagacacatagaccaaaggaagacaatagatagccccaaaataaactcacacatttaccaccaattaatggatttttgacaaagatgccaagaacacacaatgggagaaaagatagtgtctttaataaatggagtttagaaatgtggattatacatgcaaaagaatgaaattagactcttataccatgtacaaaatcaactcaaaatggattaaattctttttttttttccttttcttttttttgagacagagtctcactctgtcgcccaggctggagtgcggtggcatgatctccgctcactgcaagctctgcctcccaggttcatgccattctcctgcctcagcctcccgagtagctgggactacaggcacccaccaccacgtgggcctggctaattttttgtatttttagtagagacagggtttcactgtgttagccaggatggtctcgatctcctgacctcgtaatctgcctgcctyggcctcccaaagtgctgggattacaggcgtgagccaccacgcctggccattcggattaaattcttaaatgtaatacctgaaactataaaactactagaagacaacgtataggaaaagctgtgcaactagctctaccaaatattaaaacatactataaagtctctgtagttaaaaatgtgttgtactggtacgtaaattgaaagacagccaaatggaacagaatagaaagtctagaaataaaccaaaatacatatagaaatttagtttattatataggtaacatcccaactaactgggaaaaaattctactttatagtaaatggtgttgtaacaaatggatagtcatttggaaaaatataaaatgtgggagtgggaaaagtctccatgaatcaaaatctagtatcaagataagtctgataacatagtacttacaaatatgttttatgaagtaaatgtcaacacaaagccaaaagataaataacaaactgggagaaaataacttgtatcacagataaagggctaatctctcatatatatatatacacatatatatatacatatatatacacatatatatacgtatatatatacacatatatatatatatacgtatatatatacacatatatgtatatatacacacatatatacacatatatgtatatatacacacatatatatacatatatatatatgaagaggtctataaattgaagggggagggataaccattagaaaaatgaaaaaaaaatttgtttaatttatttgtagattctggatattagccctttgtcagatggattgcaaaaatgttctccccatcaaaaagtgggtgatagatatgaacagacacttctcaaaagaagacatttatgcagccaacaaacatatggaaaaaagctcatcatcactggtcattagagaaatgcaaatcaaagccacaatgagataccatcttatgccagttagaatggtgatcattaaaaagccaggaaacaacagatgctggagaggatgtggagaaataggaatgcttttacactgttggtggaagtataaattagttcaaccattgtagaagacagtgtggtgattcctgaaggatctagaactagaaataccatttgacccagcaatcccattactgggtgtatacccaaaggattataaatcattctactataaagatacgtgcacacgtacgtgaattgcactattcacaatagcaaagacttggaaccaacctaagtgtacaccaatgacagactggataaagaaagtgtggcatatatgcaccatggaatactatgcagccataaaaaggatgagttcatgttctttgcagggacatggatgaagctggaagccatcattctaagcaaactaacacaagaacagaaaaccaaacaccccatgttctcactcataaatgggagttgaacagtgagaacacatggacgcagggagggcagcatcacacactggagcctgtcggtgggtggagggctaggggagggacagcattaggagaaatacctaatgtaggtgatgggttgatgggtgcagcaaaccaccatggcacgtgtatacctatgtaacaaaactgcacgttctgtacatgtaccccagaactcaaagtataataaaaaaaatttgaaaaatgaaaaaaaaaaacagttcaaagaaaaatagtcctcaaacataacaaaagatcctcatattcactcataaccatagtgtcaattaaaactgacaagtcattacttactttcagaagctttacaacacattgtaggtgagcctttatgaaaataaatacaatcccatcaaagttccaataagcaactgtgtagaaattctagtgctggaatagtcaaaaacaactttagaaaagaacaaaactagaggtcttatactatctgatttcaagatatataaaattactgtaattaaaactgtgtggtattggtgaagacacagatacatacatcaatgaaactgaacggagtccagaaatagacccacactaagatggtcaatttttttttcccacaaaagtaccaagggaacaaagagaagtctttaaaaaaaacagtgctggaataactgaatatccttatgggggaaaaacaatagcaccaactttacctcatactaggaacaagaaattaactcgagatgggtcacagacctaaatgaaggaagctaaaagtacaaatttaaaagaaaacaggaggaatgaataaaatgaagaaacataggagaaaatctctgttaccttcaagggggtagggatttcttactttgcatacccaaggtatgagccataaaggaaaaattggtaaattaaactccattaaaatacaaaaaaaaaaatgtactcttgtaaagatactgctaaggaaacagaaatgcaagtggagaaagaaaatattcataatacatatctaataaagaattttattcacaataggtatttattcacaatacatatctgataaaaaatacaaaaaaaattagccaggtgtggtggcacatgcctgtaaccttagctactcaggaggctggggtgggaggattgcttgaacctgggaggcagaggttgcagtgagctgagatcacaccactgcactccagcctgggcaaacagaatacgtaaagaattcatacaaaactacaggggcagaaaacagaccagcagttgtcgaggtctaggcatgggaggatttcacaaaggggtacaaggaagacaaagtaagatacccaaaatagtatcttctgcatgattccattcatataaaggtataggcaaaaatgacatcaatggttataggggaggggtttgtgattgattaggaaagggcaagagggaattttctggtgttacagaaatgttctgtgtcttgattaggtgtgcacattctttgaaactgatcaaactgtcactcaaaatctgagcacttcatttcatgtaaactgtatctcaatagaaaaacattttagaaatcattacaattgctatatactggatacagacaataatcttaaactacccagtggtggggatggtatcttgttctcctttgtctctcaaacaccatggagcttagtgcattgtgcattgttttatataaagcacacggccctgcaaatctcaattaatacatgattaatttttttttttttttgagatggagttttgctcttgttgcccaggctggagtgcaatggcgcgatctcgtctcactgcaaccttcacctcccgggttcaagcgattgtcctgcctcagcctcccaagtagctgggattacaggtgcgtgccatcacgcctggctaattttttgtgtttttagtagagatggggtttaaccatgttgttgaggctggtctcaaactcctgacctcaggtgatccaactgccttggcttcccaaagtgctgggattactggcatgaaatacatgacgaatcttaatcaaaatggcagagcaggtgtttggctgatgtggtgatggggtaaaatcaatttgtgattcatacagccttccaacttcacaactatgccattcttaaaggatttttcatggaagggggcttcacatcaggtgcttactccttagtgcagctgatcaatacactcaatacatgtctgcaaactttaaaggaatttatgcagcagatccaagtcttaaaggctatttaaaaaaaaagcaaacaaacctagaaacaaagttcataaagcaaaaccatagcaaaacaaagattcaggcagaaagatgttcatgataacactggaaaacagtaagatcaaatgaaaacagaaagaatgattacataaatcatgccaataccttcaataaaatcctgttcctctgttacaaagaagggatagatatagatacactgtcatgagaggataatatactactaaggtagaaaaagtaaactgcaaaatattatacatgatataaacacattgtttggaaaaatatatatgtagagaaaagaagtacatgtacagaaaagaaaaatggtagaagatctgttgatagtatgtcctcaggaggtggaaaatgggggacttacacattttacaaattgtatgtctatagagtttgaattttatgtaatgtacctgtattgtttttctaattaactcttcaggtgggggaacaggtaaacctgtgaagaaggaatcatctgaaacactctcccactaacttttttctcttgctcttttagtgggtaatgttttggaatattaaccataagttttcaattcagtaccatccctcattcaatcttttattttttggtctcggggaagacagagcaatacttaatacctacaaagacaatggccagttctttcagttgaccctttccagggtaaaacaacggattggaaataatgcacaataaggaaatgccgaagcccggctcctcagcatcatcccatccctttcactattcccaaaatagatttgggggatcttatagcgcaagagtcctgactccaaaacagcctggccaggaataagtacacatcaacatcctggtcctaaatatgaaacaccccccacccttatccctcataacttggatgcaacccttgtaagggaaaaggagggttggaaggagcatgaacctaaaatgcctgaaaattattagggcaacctgccaaactgtagtcgcaaaagaacaaatagttattggaaattaagcaattacatggttcatagccctgaattattagaattaaatttatacttactatttaatttcagctccttttctaaaaagcactgaactgctttaactgaaacactgtaattttcttaattgtacttaaatatgtttcttttcttttaaattttctgcctactttgcataaaatgaggtagccaagaccaccttaaagttctcagcttgacttgaaaaggctttttcctgactctaggcccaaaactttcttttcttagagcatgatatggtttgactctgtgtccacacccaaatctcatcttgtagctcccataattcccacgtgttatgggagggaccctgtgagtgatgactgaatcatggggatgggttgttcccgtgctcttctcatgatagtgagtaagtctcataagaactgatggttttcaaatggggagtttccctgcacaagctttcttgtctgccactatgtgagatatacctttcaccttctgccgtgattgtgaggcctcctcagccacgtggaactgtaagtccaataaacctctttcttttgtaaattgcccagtcttgggtatgtctttatcagcagtgtgaaaacagattaatacagagcattttctttagaaagcttttcactgtaaattctttctctgtcttgagatatctgtaactctttttaatagcctcttactagttttacaaaccagaatcatctttgtcaaggacctgggagccattcctttgaaatgcaatcatcaaggaagacggtccccctatctcccagtttctgtgggagggtaggagcctaacttccctgagagccaattagcaaacacagctggcctaatcacggaggaaacacttgtaaactcagcaaacaactcagtatgcttccgacagccctccagcacctttctactctcatcctagagcttaaaaaccctgccccactttgtttcagcagagttagtttagactgagttctggtctctcttccctaggacaacagctttgcataaagtattccttacatatgtgactttctctggtgtaatttatgctttcacaaaggaaaactaagacaaattaaactacctataatcactgaacttccacagccccttctgccatttatggaacacttaacatgttctcgcaatgtaagtatcaggactgccctctgagttggatacaatagcatcctttcctcttatagttattttcagatataagccttaggaaatggaggcttagagaaaccaagcaatttgccataggtcacagcaaataaattctggactagtcaggactagggacaaggcatttgcctccaaagtcagtgcgttcaagcactttgcatagccaatataaaattcctaacagtgcttctatttgatttgattgtgtgtatgtgtgtgtgggtgtgtgtgtgttggcggggggatgakgaagtctctggaggatttatatgcgtgagttttgtttgggggtcgcccttttgggctctgcgcgcccatcgcggctagcgggtgggcctcccgggcgtcggggagcagctgcaagcgcagggggacgccggcagaagaaggacgcgccaggactccctagcacgcaccctcaggcctcgccgctgccgcctccgcctccgccgctgaagggcgcgcgtccacccggcgggactcctcctcccaacgccctccccaaccaccagccgcccgcgggcaggttggcagcctggccctcgcgcggacccggccgggagctggctgcactagggctgggggcgcgcagtgcgcggagcggtaggagtcagcggtgcggaaggcaggaggtgcgggtgaagctgtcggcggtgctcgaggggagcacgcaagaacctcctcagtccctcttccgcacgtgcgcccacgagtgtagtccccagtttgttccacctattatcccgcagctccagtgcgccccacctgttgcctcaccagcccaacgttacttcttccctgcttcctcgccagcccgtstgggggcggagacctcacccaccgccccacccacctcgtctcatgctcccacccacctcgtcccatgcgcacacccatctcgtcccttgcgctcacccacctcgtcccatgcgccctaccctaygccccaagtccctgaaagggccccacctaggtacccttttgggtcgtcttcaggttctttgccttgtcgaccctcctggacgaccccacatttctccgcctctcgcgggcttctctctccctcgtgtgccatggtcaccttcagctggcccagccgctgatgacagaagtttaagaagattcatgagccgctgctcctcagggtctactggagtttagcagayaacttcccaaaggcccggggtcctgcaaacccctcatgcgggccacccaaaagattccgtcctggagcagaccccgcgccacgcgcgctgtactcgcgttcctttttccagccagcgcagcccctgcggcttctgtccgggacggttctgcgcgtgggacgcccagcccgcttcatctgcgcccgctgcctttacccgccagccactccggcgtttccacctccgtgtatttctcatgctccccacgttctataatgcttgctcctcttggcgcgccccaccccaattctcgcatccagtgtrgcttcctgtttagaatcgcagcttctgattggatcacaggccaaattcactcttccctgcaatgccggatacgacttgctccagctccgaagttaagctttgtcaggagagggcgcaagaggaacactgcaggacaaggagttctcttcctggttggggaaaaatccaggactgtatagaacatcctccgccccaaactgggaaaggagccaacagaccaaagaatgactcagaccagtccagcttgatgagtagatgagtttattgggactcacgtgtagggcatttcttttttttttctttttctgtttttttttttttttaagagggaatctcatggcacctcgttttcatcatcactggatgatttctctgggttagcaaaggtcaggaagacttgttccagtgtgatctgacagaatagtcttctaaatcaaattgctctttagcttgctccaaaatgccaaacacctttaacaacagcaataaaaacacagttaccattgcaatctccccttcagcccccaactcagatgagcctctcctccactcccccactcctatcaagtgtatgttggaggacaaaaggcacagaagggtgaggtgagaaggcggaagaacagagaattgagaaagtgagaggaggccatctcttgatggacatggactaatagtcggatttaggggaagaaatcaaggcaattaaactctaggggtgtttggaaagtaacctaacgctgctgctcctcccaacaatgccaggctcccattccaaatgcccgaatcccaaatactccccaccattagtgctctcttacttaacatgcaatgttacaagggcaagatttctaccatcacctttccccagtccttgctgggaatgtagcagttaaggatcccttggttcttgtgttttaagacactactcaagaaaggataataggaccggtgaataatcttacacacttaatttgaaatcaccaaaatattgctacatttacttaactatatacttgaaggggtggatagaggaggttaatacaaaaggcaatatgacctgctaacccaatctctttggtatccatgatatagttaatggtttcggcagatttattcctcatgaactagtcttattatgtggagttcatagcaatgattgagggtacaaatattagccagttcacctgcccaatgtaaaacacctgagccttctaaaagtctaatgtggtcaggtgcagtggctcacgcctgtaatcccagcacttcgggaggccaaggcgagcggatcacctgaggtcaggagtttgggaccagcctggccaacatggcgaaaccctgtctctactaaaaatagaaaaattagccgagcagtggtggtgcactcctgtaatgcaagctactcgggaggctgagacaggagaatcgcttcaacccaagaagcagaggttgcagtgagctgagatcacgccactcaactccaacctgggtgacagagtgagactctgtttcaaaaagtaaaaaaaaaattaaaaaaaaaaactaaaagcctaatgttgctacgagactttattcctaaacgcagtgctgagaatctgaaccaggatgttttcctcccggcagtgtgtgggcaggtacagtgtgtttggtggggaggacaacaggaataatcacaataagaacaagattaataacaataaggattaatcataataagaataatcatagtaagaatagcctcacgtgtgaaacaggaaatcacatataaatcaccaaagtcaggccacttgttctagtttcttatacaggtgagtaatgatccactggtggagtaggaggaaagagggtggtgtctattcctaatttagaataaacatttgtatttacacttttattgcatatttgtagattatagcaaatgaaattaactgggattaaaaatgtttgaaaaaacacatgtttgtaacagtgtgggatttttcttaatgttagtcttaaagcatgtattgccttcatgatcacacaaataaatatgagatatttcaaacatcgagcttaatgaattatttaaagcaaatacacacaaaaccaccctatccaggtcaagtaataataacccatacattcccatgggctatttcccagcttctgtcctctataaaaagtatccattgcttttattgttatttgagcaattccctaacagttccctttttatcattttatctacacatgcacccctaaaattgtgatttcaatttttctacttctgaactttatatgaatggaatcatccagtattcattcctttctttctgcttcactcaatattatgtttggaaacttcactcatgttgcatgtaattataattcatcattttcctttctgcacagtaatctggtatatgaatgttgtatatttcccatttgtttactaatagagacatgcgggttgtttttagtgtttgacttttgtgaatataacttatttgaatattattttacgtatctcttgggagaagtggatgcaagtatctcgggtatatacctaaaggtagaatttttgggtcattgctttttgtaaaattggttaagccaactttagctttcccttggaggtacacagaactggtgaatatccctttcactcttcacataaggaaaggctggacaaactgcaaattaatagcttttatttaacctatcagttctctgattgggcaaatactggacaaacacctaactcagcatcatgggagagacaggtgcctgcagggagcaacaggacaagcatctacttatacaaggcagacactgaaaatgatatatcaattggtaagaagatttaaacattttttaatgcattgctaaaggccaagtattggtctagcatgagaacataaagatcattcttttatttttaacctctgtgatacagtttgctttagttgtgtttcttacataccgcagagttggattttgcttgttagccaatctgaaaaatatttttttcatctagtcagagaattaagcctttctatgtttactgagaggaccaatatgttctatagaagttctcccacactgttctgtaattacatgtcaatggaaatacacatatctacatacatgcataagacactcacatggcacatatccccactctggttggttctatttattgttatattcatgatacagaaacatttatgcatttttaaaatatgtatcaattatgttatattttatcacacagatacctttcatttagcccaaattttagaggcacatatagtcaatgcccaccattagttcttacacacaagctctgccaatcaatttttagttaatgggaatttttttcatttgtatattcttcaggaagagctaatagaaacagcattccttgtgttcatgagtctttgtgactcttttctcttttttttagatggagttttgctcttgttgcccaggctggagtgcgatggtgagatctcagttctctgtaacctctgcctcccggatcaagcaatggtcatgcctcagcctcccgagtagcttggattacatgcatgtgccaccatgcccggctaatttttcgtatttttagtagagatggggtttcaccatgttgaccgggctggtctcgaactcctgacctcaggtgatcacctgccttggcctcccaaagtgctgggattacaggcgtgagccaccgcgcctggccttttgtgacttttaatcttgaaggtcacttcgactggaggtaaaaaccttgcttgtgtttttctttcattgaatatctttatttatttttcatttttatttttagagacggagtcttgctctgtcgcccaggctggagtcggtggcgcgatctcggctcactgcaagctccacctcccaggttcacaccattctcctgcctcagcctcctgagtagctaggactacaagtgtctgccaccatgcccggctaatttttgtatttttagtagagacggggtttcaccgtgttagccaggatggtctcgatctcctgacctcatgatccgcccgcctcagcctcccaaagtgctgggattacaggcgtgagcccccggcctcagtgagtatcttaaacatctgacttgctctcctggcataagaccttcttgttacaaaatctgcactcgatctgactttttctattataaaatgcttgtcttttttgtctacatatataaaagtccctgccccattttattattaaagtgaagtagtttattagaatattccttggtgttagtgattaggggtcagttttttcaggtatactggttgccctttcaatgagtagatttgtgttcttttatttcaggaaattttcttgaatgataggttttagtatttgttctgtggttttgctttttatctttgtggactgctttcataattgttttgaattgatattgycttatttctccctgacaagttctcatctatatttccatttgattgtttttctatttttctcttttccaatctccatttcccttacactttccacactattagctcttgaaaagtaagtgtttcttaaatgtttacttaaaaaactccagctgggtgcagtgactcacacgtttaatcccaacactttgggaggccaaggcgggtggatcactcgaggtcaagagttggagaccagcctgaccaatatggtgaaaccctgtctctactaaaaatacaaaaattagctggacatggtggaaaatggtcttttacttatgatatttttctatggagttcaattataatcttttaatttgttcatgttttagtgagatgaattttcttatggttttggaaatagtttcatatataggagatggggtgcaacaaaataactttcttttttttttttagacggagtcttgatctgtcttgcccaggctgaagtgcagtggcatgatctcggctcactgcagcctccatctcctgggttcaagcgattctcctccctcagcctctcaagtagctgggactataggcatgtgccaccacacccagctaattttgtatttttagtaaagacagagtttcaccatgttggccaggctggtctcaaactcctgacctcaggtgatctgcccacctcggcctcccaaagtgctgagattatagacgtgaaccaccacatctggcctaattttcttttttgatattacaaataactttataccattgtattactatagttaacaatttaagtgaaatggacgaattccttgaaaagcacaacatacaaaactgacataaaaagaactacctattccaaaaccccatcaaaaagtgagcaagggatatgacagacacttctaaaaagaagacatttatgaagccaacaaacacataaaaaaaagctcaacatcactgatcattagagaaatgcaaatcaaaaccataatgagataccatttcatgccagtcagaatggagattattaaaaagtcaagaaaccacagatgctggcaaggctgtggagaaataggaaaaaacacttttacgctgttggtgagaatttaaattcgttcaaccactgtggaagacagtgtggtgattcctcaaggatctagaaccagaaatgccatttgaccctgctatctcattactgggcatacacccaaaggaatacacatcattctactgtaaagacacatgcacatgtatgtttatcgcagcactatttgcaatagcaaagacgtggaaccaacccaaatgtccatcagtgatagactggataaagaaaatgtggtgcatatataccatggaatactatgcagccataaaaagaatgaaatcagcacggtgtggtggttcacgcctataatctcagcactttgggaggctgaggtgggtggattgcgaggtcaggagatcgagaccatcctggccaacatggtgaaaccctgtctctactaaaaatacaaaaaaattagctgggcgtggtggtgtgtgcctgtagtcccagctacttgggaggctgaggcagaagaatggtgtgaacccaggaggtggaggttgcagtgagtcgagatcgcgccactgtactccagcatgggcaacagagcaagactgtctcaaaaaaaaaagaaaaaaaaaaaaaaaggaatgagatcatgtcctttgcagggacatggatgaagctgaaaaccaacattctcagcaaactaacacaggaacagaaaaccgaacactgcatgttctcactcataagtgggagttgaacagtgagaacacatgggcacagggaggggaacatcagacactgagacctgtcagggggtggcggggaaggagagggagagcattaggacaaatacctaatgcacatggggcttaaaacctagatgataggttgataggtgcagcaaaccaccatggcacatgtatacctatgtaataaacctgcacattctgcacatgtatcccggaacttaaagtaaatttaaaaaaataataataatttgcgaataaattctgctccgcaccctccagagccagggaaaacggtccaaaactgggactgcagactactcctgcttcaagaccacgaccactcctgtgccagggagggagaggggcaagggcgtgtaaaatcatcacaaaactatccactgttttgaagtgacttttttattggttcagtattcatttggttgctataaacttttgattgttttccatagtcctgacaaaattggttcagacagtttctgctaatttttgaagcttttgtgagatggtaatgagaagttatgcgtattctacctttttgctgacaaattgttctccagtttcccgtatattgatacttagttactatttccctctgctttgtggttastttcctttggcaggtgagggacaggnattttcatcaattgaagtattttgatattcttctgtttccttcttatggcatattaaattgattatctgaaccaacaataacaagtgatttaatggatgaatggtaatattttgattagtttgtaagcttcttagtacatattcatcttcttctattaatacagtgaagtgcagtttctttaacaaatagaactttttctaagggaatgaagcgactcaattctgtgattcttgctaatatctgtatgaagttaaattatgctggacatgtccttatttctctttgctaccctaattctaaagggcacttctattttctaagttgcttctctctaacctccaaattaatatctctcaagattaacatttatagctttgcacattttcaagcctctttatttatttccccctataaccaggattttgattgactaggtctagttctcagagatttttttcagtatttcccagctcatgatggatctaccgctgttgccactgtgttccgtattctcttttctgcagaatcctcacctgctctctatgagagattcccttgttcactgtctcctgtagcactcagatttgcttttcccttggtgcatccaaagtgggtgtttcaatctacgctgtcttttagaatgcacagttttcacaaccttcttcctactgggatagagttaagaggttatagggattttatttgtctgtttgctaggtatcaaataatcacaagcttttacaggttagggccatgaccactaattgaaatgactatcctttctcatttgaattactttggcacctcatctgaaatcaactgactatacatgtatgaatctatttttggactctgtatcttattctatctatctatctatctatctatctatcttctatctacttacctatccatctattcattcatccatccatccgttcatccatcaatccatccatccatccatccatgcatttatcttctctgtctctactcatgctaataccacactgtcttaattatcgtagttttataataaggtttcaaataagttggtgcaaagtcttgcaattaaaaaagtatagtttgggataatnaagttcttttgaatccaaaatcaattggccatacatgtgtgaatctatttttgaactctgtatcttattctatctatctatctahccatccatccatctgtcatctatgtctctacttatgttaataccacattgtcttaattactgtagttttataataagttttaaaatgagttgtcacaaaatcttgcaattaagaaaatatatatttttggataatgaagttcttttgaatttccatataaattttagaatcagctaaatttctaccaaaaataaaaagcctctaggatgttgattgagattgttttgagcgtataaatcaatttggggacaattgacaatttaaaaatattgagtcttctgatccatgaataaggtatatttctccattatctcaagtcatctttaatttttctcagcaatgttttcagtcttcagtgtacaggtactgcacatcttttttaaaattttccctaaatgttttatgtatttcatgctaccacaatggtattgccttgaaaatgatattagcaatagatatttctagatttccttactcaaagtgaagatgtttcattctagtcctcctttgctgaaaagtctcttttttggtagatcattcatttttattgctgagggtattccattgtatgaataattcacagtttgattacccattcacatgttgatggacattgggttattttcaatttttggcctttataattaaagctatttatgaatgtttgcatacaagtgtttctatgttcatatgctttcatttctcttaagtaaaacttctagaagaagacatccaatcaagcttttgtgactctgtattgggcaaagttttttagatatagcactaaaagcacaattcactaaaaaatgataaatttaacttcaccacaattaaaaacgtttggttcttaaaagatgctttgaaaaaaataaaaggccatagtctgggacaaaatatttgyaaatggcttactacacaaagggytgatattcagaaygtacaaagaattctcaaaacccaatagtaagaaaaaagaccaattcaacaataaatgaaagaaaagttcaccggtcacttcaccaaagatgatacacatgtggcaaataagcacatgcaaagatgttgagaagtttcatcataaaagggtgttaaattttttcaagtgctttcccctctattgagattaatgtataatacaatatagatactaatcacagagattctttcccacagagaaaatgcattatgcacataagctttgaatcttagtgctatcttgtacaaattttgtggtgttgagcaagtttttacattgtgtaaggtttagttttttcaaaatgaggataacatataacttgagttattgtcaagattcacagtaatgtaggtagaattattcacatgtaataagtaattgactaccagtagctctgatgagatttgtagagcctcagatactcactttctgtactgtaatttatggagttaggaatacttttcaacaggaacacaacatattcacctcttggatatcatagtatttgctgatgctcatcccaaggttataaatgggtaccagcaggaatgaatcaagcagaaagtttttaaaagtattattccaatctgcaatgaaaaagataatgttagcatgctttatatgaaatgaactgtcccaggataacaaaagtctcccaagttgataaaattaaacagagaaaattaaaagctgtaacattattctcacaaaccctccgtttttagcataaagtatactacccctgatttcttgaaacatagtttgtgttgataattacagctttggaaaatccttttgggaaagctgatgtccatatcatctgtcttcctgtcatctcatgcgaacaagaaaccaatgctgattatttctcataccgtttattttatataaccaatgaaaaagcaaagatgtgataggaaatgtagcctaggactcaacagtggaaagaggataaggaatatatcatcagttgaaaggacatacatcctcagagaaacaaacttgatgctgagattcctctaaatactaaattaaatatgtataacagtttatgaatatatatgagtaaataagaaacatgtttaagaggtaaggctctgaactgtcactgtaagacttcaagactgagttcaaattactggaaaaaaagatgaaattataagtctgagcaaaaagcatatttgtaagatgcttttgtggccagaattggttccctcccgtgggttcttggtctcgctgacttcaagaaagaagccacggacccttgcggtgagtgttacaattcttaaagatggtgtgtccagagttgttccttcagatgttcagatgtgtcccgagtttcttccttccagtgggtttgtggtcttgctgacctcaggagagaagctgcagacctttgtagtgagtgttacagctcttaaaggtggcacatccaggttgtttgtccctcccggtgggttcgtggtctcactgacttaaggaatgaagcctacaaccttcgtggttagtgttacagttcacaaaggtagtgtggacccaaacagtgagcagcagcaagayttattgtgaacagcaaaagaaaaaagttcccacagcatggaaggggatccgacrttgccactgctggctctggtggccagcttttattcccttatttggccccacccacatcctgctgattggtccattttacagaacactgattggtccattttacagagtgctgattggtccattttacagagtgctgattggtccattttacagagtgctgattggtccatttacaatcctttagctagacacagagtgctgattggtgcaattttacagagtgctgattggtgtgtttacaatcctttagctagacacaaaagttctccaagtccccactccacccagaagcccagctggcaatcagtactctgtaaaatggaccaatcggcactctgtaaatgggccaatcagcgctctgtaaaatgggccaatcagcaggatgtgggcagggccaaataagggaataaaagccgggcacctgtgccagcagcccagctggcttcaactctcactttgacagaagagagggtgtcacctgagtgaggaggtagagggtaagtttgcacctaatatgtaaattcttatgacattcttatgacaaaatggtagaagtatgtctttccctatcagtgattacattaaatataaatagattactgctccaattaaaggatagagattggcagaatggattttaacaagcatgatccaaccatatgctacctacaacagattcaatttaaatttaaaggcacaaataaaagtttaaaagacagaaaaatatattcaatgcaaacggtaaccaaaagagagctggaatgattctactaatgtcagacaaaataggctttaagataaaaacggttataagagatgaaggacattatatactattaaatgggttaattcatgaagaagatacaacagtaacaaacatatatggtcctaacaacacagccctaaaatatatgaagcaaaaactgacagatttaagggctttcaacaatagtagttggagatgtcaataccccactttaaataattatagaacaactacattgatcaaacaaatataagatatgaacaacaaaataaaccacctgacctaaaggtatatataaaatactctacccaacaataacaaaatacacatttttttctcaagtgtacataaaaaaattatccaggacagaccattaattaggccacaaaacaagtcttaataaattataaaaaactgaaataatatgaagcatcttattatgactgcaatggaacaaaattagaaatcagtaacagaaggaaatctgaaaatacacaaatatgtgtaaattagacaatacaaacttaagcaacaaatgagtcagataaaaaatcataagggaaattagaaaatactttgacatgaatgaaaacaaaaatatggtataccaaaacttataagaaaagcagtttagttttttcacatttattcttacatttaaaactatttcaaataaataatctagtcttccaccttaaaaactggaaaaagaagagcaaaccaaacccaaagccggtggaaggcaggaaataataaagactaaaacagagataaatagagaatgtaaaaacaacaggccagggaaaatatacaatccctttaaagaatcaacacaaatcaaagacctttatattgactgaccaaaataagaagaaagaagcctcaaattattaaaatcaggaaactaagagaagacattactaccaatcttacaaaaattaaaaaacattacaagagaatactatgaacaaatgtagggcaattgataacctagatgaaaaggacacaattcataacctagatgaaaaggacacatttctagaaacacacaaactacaaaactaactcaagaacaagtaaaatatctgaatagacctataataagatatttaattagtaactaaaaacctctcagcaaagaaaaggttgggataagatggcttcaatggtgaattccaccaaacatctaaagaataatttacattggtcctcctgtttggtttttaaataaacaaccaattgtcctattctctgacaccccaactgggtgtcctacaattgaattcaattctagcactacaaagtattttcgaatttcccttgtgattttttatttgactcatttgttgcttaagcttataagttagcacagactccatgggttaaagaaccaatcccacaagattgcacccgctttagacacagccacaaatagggaatacagggtacctgcacttctgcctggataactacaaatgttaggactcccacaattgttcctctggtttgataatgtgctaaaaacaactcacagaactaaggaaagtgctacatttacaattacagtttattacaaaagaacaggcaaatgaagaagtgcacagggcaaggggcatgggacacagagcttctgtgccctctccagtgtgccaccctcccagcacaccgatgggttcaccaacccagaagctctccagatctcattgttcaagagtttgtatcaagacttcattatgtaatcatgattggttaaagcaatggcctttggtgactgaactcaatctcctgtctccttccctcctggagatcaggggtgaggatgtgggctgaaagtttcaatcctcatcacatggttgattcctctggcaaccagcacctatcctcaagctatctaagggccttcctggggtcactttattagcataaactcacgtatggtcaagttttgaataagaaaagatattccattcattccagaaattccaaggactgtgggagctctgtgccaggaacaagggatgaagaccaaatacatatttctgttatatcataccttctcaaactctaccaaaaaataggtcttatggttgtttggaaaacaatttcctctctaacaaagagtaaaggcttttctatttgaaatctttgaattatcactttgagtaaatgaatgactattattttacagtgaccagtgattctattttgatgaagtgttttaagcctttagtatttgacatacttccaaaaatcaaatttcaaattctaaaattaagtattttcctttttttttttttgagacggagtctcgctctgtcgcccaggctggagtgcagtggcgtgatcttggctcactgcaaactccgcctcctgggttcatgccattctcctgcctcagcctccctagtagctgggactacaggcgcccaccaccacgcccagctaattttttgtatttttagtagagatggggtttcaccgtgttagccaggatggtctccatctcctgacctcatgatccacccgccttggcctcccaaagtgctgggattacaggagtgagccactgcgcccggcctaaaattaagtatcttccaaaaggaactcctagatgtccaagagagacatagtaggcttatttaatatgttaaaattatataggaaacactggcaaataagaaatggtgcttgactttctttgagtcatatttacataaaagtgttattaaagtatgttccaaaattgtaagaaattcctacwattctgatatgtcttggtatatgttatcggtaatcattacaatgatgttaaattgtatgccacagaaataatcaaatatccttgtcaattatgtctttaggctgggtgcggtggctcatgcctgtaattccagcaatttgggaggccgaggcgggtgggtcacctgaggtcaggagttcaagaccaggctggccaacatggcaaaatcctctactaaaaatacaaaaaaaaaaaaaaaaaattagctgggcgtggtggccggcgcctgtaatcccagctacttgggaggctgaggcaagagaattgcttgaacccaggaggtggaggttccagtgagctgagatcacgccattgcattccagcctgggcgatagagtgagactctgtctcaaaaaaaaaaaaaaattctgtctttaactatgtctattctaagagatttgtcattctcaattattgttttattttgattmttctcaaaaagtggtttataatcagctacagtccaaaattggcttcttcttaaggaacttcatggaaagaactatgacaagtactcttgaatccaggtttctgataactttggagatcacaccattsgagtgggcaaaaacttccagagctctaataaaaaacctgatgcattcatgagggttgctaacycaacatcaagtggaataataattagctacatgggactaaactgatagaggacaaagatgatttttaataacttttttgcttgaaacattgctgattctttttatgttttgcttccagagttaataaaccttttttcttttgagctattcatagcttacaaaaattgggtaaatatacctttgtgggcaaatttgaagcatttgcctttctcactastggatttctcccaaatttggaaactgtgagtattcttaatttatggcaaaatagttatttgcataagttcaataaggatctgttttattttataacaggacataattagatacactggctattttatcaaggctttggctggaatggcatattttcagagatgaccagactgcttggaggaattgagattagctttacaattttatagtgctgataaaaagccctttggaaagtctggcatggttccttgtctacacagttcccttgtatggtttctgtgcttgcactaagtaaagaatgtcactttctggcagggccacgagcctcagtatattttgggaactcaagaagagagaaattaacccaattcatacaggtattacagatacagccaagcaaatacttggtttggcttcctagcctcaagacttttaaaagtctaatccaaaatttagtataaaagtcccagcaaagccaacttttaaaagccattcactatgcccactgtgttttatgtaaataatcaggcgaagtatcataagccccaagtttattttgcaactatgcatctgacaagggtctaatatacaaaactacaaggaactgaaacaattcaacaagccaaaaacaaataacccaaataaaacatgggcaaaaggaacaaacatttctcaaaagaagacatacgagtaaccaaaaaatatatgaaaaaatgctcaatatcaccagtcatcagggaaatgcaaataaaaaccacaatggaatatcatctcacatcagtcagaatggcaattattaaaaagtcaaaaaacagatgctggtgaggctgtggagaaaagagaacacttatacactgttggtgggaatgtaaatttgttcagaaactgtggaaagcagtttggggatttctcaaakaacttagaactaccatttgacccggcattcccattactaggtatatacgcaaaggaaaataaatcattctactaaaagatacatgcgtctgtatgttcattgcagcatcattcacaatagcaaagacatagaatcaacctaggtgcctatcaatggtggattggataaagaaaacgtggtacatatacactatggaatactatacagccataaaaatgaatggaattatgtcctctgcagcaatgtagatgcagctggagacaaaaagaaagaaagaaagaaagaaatgtctagaacctacaaatccacaaacaaaaaagtagattggcaattgggagaggcagtggggagaggagaatgggatgtaactgaatgagtacagggtttatttggggggtgatgaaaatgggattagatggtagtgttggtcgcacaacatcgtgaatatactaaaagtcagggaactgtgcactttgaagggtaaaaaaggtgaaatttatgttatttgaattttacctcaattttctgaaaaagaaaaagaaaagcccgatgaagtggataaaatgttatttctgcattactgatgagacgcgtaggtcacgtcacgttgcctcaagtcagactagcaccaaaattgactacaccgctcaaacccttctatctagcactaaacaataagccaaaaaaaaaaaaaagttaaaattcaaccctaagtccctatgggttttcatttgttagaggcgcgcgctttcgagctccgcgcgccgaccacsggcagcgggtgggccccctggcgtctggagcagcggccagcgcagaggacgcaggcagaaggaggaagggctggccggggctcccgagcactcactgctcaagcctcgccgccgcctccgccgctgcggggtgcgcgtccatctggttggggctcctcatcccaacaccctccccaacggcccgccgcgcagccgcccgcgggcgagtctgtagcctgatcctgcgcggacccgccagaggcacaccaggaggtggggaaccgggggcgcccggggcagaccggggtgggagtgtggggagccggggacggagtgtggggagccggggacgcgcggaaggtgccgggggcgcgcggaggagccgggagcgccacctcagtccccccaccgccccaccccgcgcatgctcccaagagccccagaccacccttctccggcttccgagatacttcatccgttgcttgtcctggcccaccgctcagtcccccaactctaggacgacagaggttagggataaggggaatgagacacgcgccttggctgcagcattcaaggtgaagccaactcaatagtcaaaataaagacttttatacaatatttttacattttaaaataaaatgtaaagataaaatttcgtgaggagctrtattggcatctacagcaaaaggaaaagtcagtaatcctgagccgtctttgttgaaaatttttgtactctgttcactgtggattttttggcattgatttttattttaaatattgcatttagatgttttagtttaatatttatcatgactactgagtgaatcccgtacattttgtgccataggtgagtacctcactatggtacagctctaccctgctgccatcttcactgtggtagtggcagaagtctagggggatgtaagtaaccacctcctccgcagggtctgttaggggttagcagggaacttccagaggctcaggcacaggagcttacatggcccccaggcttgtcccaggacaaggtctcagggaagggcggggaaaagagatttacaccagctttctcaatactgacccctgcattactaaaaagtttattaatcttctttctgttaagtcataattataataataatttcattattttaataataataaaataaacctcaataacacctaatatttaatatgctacttattaataatacttattattggaggcttgggacaattagttctctgtgcctctggtctcaaaagaagtgatgcaaccaagactagttttctcagtgctactttactgaggacctgggtgatgtgaaccaaagctttatcaggaagatgatttgagatgatttgcagagttgtcctgtttctacaggattcactggagtgaattcctattattgaggtttcttattttgtcattgttaaaataatgaaattactattataatcatgacttaaagaagrttaataaactttctagtaatgygggagtcagaaataagatttctatttaatcggggctaaattcctgaatttactatggaagcaaataaatatctggctttcttatttcatatctcttttagttgatgagtatttggttttgctttttttctccttgttaactttaaaaaaaaaaccacacaatttataaatttagacaagaagagactttcttatacgaggttacagcctgcaaggtgggatcctatgctgggaagcacgctgtattattccgttttcatgctgtctataaacacatgcctgagactgggcaatttacagaagaaagaggcttattggatttacagttccacatggctggggaggcctcacaatcatagtggaaggcaaggaggaacaagtcacatcttacatggagggcaatagcaaagagagagcttgtgcagggcaactcccatttttaaaaccatcagatctcgtgagactcattcactatcatcagaaccgcaggggaaagaccygcctccatgattcagtcatctcccactgggtccctcccacaagatgtgggaattatgggagctataagaagagatttgggtgtggacatggagccaaaccatatcacatgccttggccaagatcagagacaggcactttgaaggaggagggttggggtaggagctttatgctcaacaggttggctaaatatacatattcaacaggtgagagaagaagctatgaatattcatgaaagtggtcctgatgcatgtgtatttaacaaacatgcatgttacatacaactcatgttcattttgggktggttgcarcatttaaatrtattacaattcagcctgatacgtcaaaaggtcttttcaggacatgaaggcatgcaagtgtgcaacctctgtaagtcagccagaaccatcctatagtcggtagtcttatcaggagaaagttactgaaatcagtctcttgtccaatcaagctgtagttatggctggtggaacaaggggtcggttagtcaatatctgtgatttggatgagttgtaattgttttaatattgcatatcttcagccgggcacggtggctcatgcctgtaatcccagcactttgggaggccaaggcgggtggatcatctcaggtcaggagttcgagaccgagaccagcctggccaacatgacaaaaccccatctctactgaaagtacaaaaattagccgggggtggtggcatgcacctgtaatcccagctacctgagaggctgaggcaggagaatcacttgagatcatgccactgcactccagtctgggtgacagagagggactttgtttcaaaaaaaaaatttatatatatatatatgcacatayatacatatctatatagatacatagatacatatacatatctatatagatacatagatacgtatatatgtatatacatatatgtttgtgtatatatatatatacagagagagagagagagagagagagagtgagagagagagagaatcactctgttgtccaggctggagtgcagtggcacgatctcggctcactgcaacctccacctccctggttcaagcaattctcctgcctcagcctcctgagtagctgggattacaggcacatgctaccacacctggctaatttttgtactttttgtagagatggggtttcatcacgttggccaggctggtctcaaactcctgacctcacatgatccgcccgccttggcctcccaaagtgctgggattacaggtgtgagccactgtgcccaagccatgttccctatcttctctgagcagggctggggaaaacaaaaacaaaaatattgcttatcttcaagccagtgcttgtttagctgctggagaaaacaaaaactctgtggcagttagaacatagcttttttctttaagtgtaagggtgcgtgacttaacccttcctggcatggccttagatcctgtttataatttgttatcgtattgccacaaagagtctgttctgtcagtcttgtgatctctgtattaacattaaggctgctcagttgtgtctaaactctaaaagggagaggatgtaatgaggcatatctgatttgccatcccatcatggctggaaactaagtctttaaggtttttctggggtctgcttggcccagagggggttcattcagtaggtggggggcataggattttatttttagttcacattcacaaaaacaaagggccaaaaaagtcttactgtgtcacacaggctggagtgcagtggtgcaatcttggctcattgcagcctccatctcccgggttccagcaattctcctgcctcagcctcctgggtagctgggattacaggcacccgccaccacacccagctaatttttgtatttttagtagagagaagattttaccatgttggccaggctggtctcgaactcctcacctcaggtaatccacccacttgggcctcccaaagtgctaggattacaggcgtgaactatcatgccagggctatatgtctgtgctttctaaacccaataaatgtgatgtaatattaatgctaacagcacacgtgatgggccagaaacatttctataagcccagcggctctgggcataaatttctagggatggtgaaccgaagaaacaaaattgtgtcattgaaatcagcttttcccaaccaccagtgtcttctctctctctctctttctctctcagtgttcacttattacatggctactctgtgccaagcactgttgctaaacacattatgtacaatttctcatttcattggtactgattttgacacttactcatccactgtcttttatcatgatgtgaccatttcctacaaaatgccctatgtagcttccaaccaaaataccacaaagcacaacttcagcagtcctgcctcttgaccttctcccaggctctgctctcgctcatctgttccatcctttgcattggcagaagacccatctttctaaatgcttactctcttggagcatgtaatttctttcctaggaatcaccattctcagctgcctgactccaagaatcgytctcagttttatcttctgatgctcctagacctcagcaccttattccagcctaacacatctggcaactcactgttcccagagctattcaacatgccttccacctcagggctttacttggcctgtaatgccctcttcctctctttctgccaaagtagcttaatgattaggaatataattctgaagtccaaccatgggcaaagccagctcctctgctgacttggtggatgaccttgaactaaatttcttcccttctcagagcctccaatggacagtaaaactaataacaacacctccctaccttagaggttgttgtataattaaatgagataatatacataaagtgcatggtgcagtatctggtacatagtaaagatcaataacctgatgttatcattgttgtcgtcactattattatttcagaccttggtttctccccactctttcatgaagcccttatctaaccactccaggtcaaaatcatctctcttttctttgaattaacttacttttcctatcactgatttgatgactaggatttattgccttaagctttacatcattcctttccgattttatttccccatctcaggtaaaaactcctggaagaaaagatcctgcaatttggctttttgtgagatggaaaagattacaccttgccctgcaaacttcccccctttaaaggcgaaggtttgttaggttagttagcctgtgagaaaactgtgcgttcttagcaatcaaaggccagacatctgggggtacaggggggaggaagactaggataagagactctagacggggacagaattaaaaggaaaaaaaaattaaataagcctccgtctccttttatctcctagcagtaggcagtaatttaataaataaaggagccccgttagcgttttccctgtccattctttcccaggcacggtgacctagacagcagcaaaaagcgagttaatagggaggggttatgtaggaagcaaaagtcaaggaatgtggctacagctgattacaggaactgagaaagtggaccaaacaatattgactcccagcacgccaccgcgatgtccatcttggggaatccgttgctggaagggacccatctcgcccacccttaggggtcgaggtgggcgaagggggaggagagggctggcggggcggggcggggttgctccgcccccggaggctgggctgtgaccagcaggcggctccacagagcagcgggcgcgctcataaagggcacagccsagggtacgtggatcgcggtgcggagactgaggttagaaggcacaggtggcgagatgagccgggtaccagcgttcctgagcgcggccgaggtggaggaacacctccgcagctccagcctcctcatcccgcctctagagacggccctggccaacttctccagcggtcccgaaggaggggtcatgcagcccgtgcgcaccgtggtgccggtgaccaagcacagggggtgagtgaggagggtcggggtcaggggcaggagaaactggaaagcggggaaaggaggagcaggaagaggaggggtgggagaagggaagagacggcttgcctaaccgttgctaacagctgccacttttaataggcgctacccggtgtgctaagtgggcgttttacaggtgttaccttgtttatttcagcacactctccacctagggaggtattgataccaccatttgattggtggaaaactgagactcagagaggttaagtgacttaccyaagcttacacagctactaagtggcagagctggaaaggttttctgatccagagccagacttctgaacatactgtgcatagtgtctaagggaagggcagagggatgcgggggytggaagagggccagtggggtggtgaggaaggaaagaaaaaggaaagtatatggatactttctaagagaccccagcattgatgggaaggggctgaagctgctccctctctccttgtagctacctgggggtcatgcccgcctacagtgctgcagaggatgcactgaccaccaagttggtcaccttctacgaggaccgcggcatcacctcggtcgtcccttcccaccaggctactgtgctactctttgagcccagcaatggcaccctgctggcggtgagcaacttcctgtcccggggtggaatggggcccctgggcccagattgaagctcaaaagtaagttctccgcagcagggggagtcttgattgtgactacgcgtgcccctctgcaagtgactggataccagcaacagtgaaggttatctgtgtccatgtatctatttctaggactgcctgaggatgcataacacggcaccagcgcccactgctgcctcaagcatgtgacagtgtggaaataataatcttgttgtcattcttgcatatgtccttgtcctatactcagttgccccaaatacgcagcttgaatgaacccattagccaagggaagacttacttactgaatccttgtcgacatggaaaagaaggggtgttctataatccctgggagtcttcagaggggtatacggtgtkacctgttttaatatctaatcatagtttcaaaaggtagcagtagcttgtgtttatggagtactttttataatgcatcaggcacttttctaaacatttcacatttattaatcctcttaatacttaaaactattctatgatatgggtaatatgattactcccactttatagatgaggaaaccgagtcagagcaactatgttcaacttaccgaggtttatgtaaccaacaattagcatggytggacttcagagctgctcagtctaagtccacggtccataggtccagactcttctaagaccaccgccattttaactgctacatattgggcacttatgtgccaagaaggagacgctgatcacattcaattctgcaaaattcctctatgggtgtttttattaactccccttccccccaatttctgttgaggtccttgaggctcaggttagtagagtcactttgcttgaggtcacacatctggttagtgaaagactcaagaatcactccyaggtgtgacagttaactcttaaggtctgtgcgctccaagctgggtcttacaatgtccctccttttcccctgaatttctggatcgccaaataatctggccgtttaacactcctttgagaatatctagctttccccaacttayactcatccaaccgagatggcattcatactacctgccaacagcggttccctaggggggtagaacccaaggctttgaaactagatgacagctgaatctgctcagtgacttsgtgattcacttcctcatctgtaaaatgaggttgatgatgcctattttttgatgatcagctgagatgaataacagrgagaggagtgcagaggatggtttttactagcgaggcataattttcaaccttcgctgtgtatcggaatcacctgggctgtctgggtctcactcctggaagagatacagactgggttaatctaagggtggtatctgagcatcttcacgaagctttccacatgtgcagcaggaacggagagccactaagagtttcatggccgttgtccagatgtcaattggcaaccttctctctctagttccttcttaatttggtgttttgagaatcctagggcaagaaaagaaaatgggcagttcttgagggctcaccatgtgctagatgtttccagatatgcsagtgcatttaatcctcacaataaccctctgaatggctggcattatcttttttacaggtgaggaaaccagtgcttaaagattaaagtgtttgttcaaagttkcatatctcgtaagtggaggaatcggatccaggtctgacgccaaacccatgctgtttgtaggatgctatamaacttcctaagctaatattttagaactgtttcttctaatttatgcagtggacaggggttccccttgctcactgtctctcytttcctccaaggtcatggatggaaatgtcataactgcaaagagaacagctgcagtttctgccattgccaccaaggtaagatgaatggctggctgtaccattaaggtgagctgtcaagtggggtctggtgtctcaatcttgagagactaaaggagaagtggggaacttattttggtttcctgttggacatagctggaactccagatgtcagatatatcagtaattcacraaattattagctaccaattagtgtgcatgaccagatttcaagtaccttatgtgcataattctcaatcttcccatcagtcttgaagaatcgaaatgagaaattctctccaccttccaggtcaaggaatatggctcagagagcttctgtgaattgcccaggatcacacagctaataagtgctagagtaagaatttaatacttgacctctctggcttccaggactggcttcttgtccctgtaccacattgcccctggtaagacagtataattgtcccatagaccaaagctagtactacacaagaggctgagtgaactgaacatatccaagccagatccctgtattcattcgacaagtattgactgggcttctataatgtgtcaggcactgttctaaatgttagggaaatggcagtgagaaaaacagaggggcacacacaggggaggtagacaataccaataaaaaggaaaacacaggctgggtacagtggctcacgcctgtaatcccaacattttgggaggctgaggcaggcgtatcacttgaggtcaggagttggagaccagcctggtcaacatggtgaaacctcgtctcttgtaaaaacacaaaaattagctggtcgtggtggtgggcgcctataatctcagctacccgggagagtgaggcaggagaaacgtttgaactcaggaggcrgaggttgcaatgagcccagatcgagccactgcactctagcctgggcaamagagtgagtgtcttaaaaaacaaaacaaaaaggaaacaaaacaaaacaaacaaaaacatctkttgagtttaataatgtgttaaatagtaataaataatatgtaattaaataattagtacatattaataaatgattaatagcgtgcttagaatttgctaaaaaataaaaccaacaataatccaaaaagccacataacatgttaggtgaagataaagcagaagtgagagtattggagaagctgtcacattttacattatccaagaaaggcctccctgagaaggtgacatttgagtcaaagctgaaagcagtgagttagcgaaccatgcaaaaacacggaggggcactccaggcagagggaacagtaagcaatgggggtgatgatgttcccaagcaatgtcaaggcatcctataagaaaaacagcatttttaaaagttagagttaagaggatgaggcttaggaaacagggtgtctgtgggaacgattggagtctggagtctttcacattaaatgtggaagtacaaggtcttgggacactggttttcctaagttattataaaggaaacgtggtaacccagggaaagttgcagcagcaaagaccaggtgttcaggttgcatgtcgaggttttctagatacctgctggggagggaagaatgggaggattaatctggtaattgtatgcraagggagtagaccaacagcacccacctcaatgaactggtttttagttatatccagacctgactcaactgaagtaatcaaggactccttgctatgtttgctggtaatttgggaacagaatgaatcttgtattactgtcatttgcaaagagctttagtctttttcaaactcatttccagccccttgtctggactacgagtttctgtgaggaaggcagagaargtattaatggcctcattttacgcataaaagaatagaaacttgggtttcctgaagtcatacaaccaggttcctgcgggtccttttgaggccacatggtcttgtcccagataagaagtttccaacagaagcaagctatgcagcagcattagctagggaagtttttaaaaactcaaattcccatgcctactgaatcaaaatcacagagtgaggatcaaccaggtctggaaaccacacttttgtagacccagcctgcaataacactgctttgttgcattaataaaaatctgtgctcccagaagaatcaagaagccttgggttgacacttcaaagtttagacacttcaaagtttaggctgaaacttcacagctttatttccaggggctcagatgaactgtttcaataaggaacaaagggtctattttacttgttgccttgagagtagaatattttcttgtccatcatttctcttytatttagggctcttgttggggagaataagtatayggagctctagggtctgatgaacataatacattttttgtgcttgggtctcacataagcttcattgaagcctctgatatgttttctcaaggtgatagtatatattagggtttagcactracatacatttattcaacaaatatttgagtgtccaccaaatgcaaggttctacgctcagcatggggtaagcaaaaccagatacagtacttgccctcatgtartacagggtccagtgggggaggcaagatatagtccaaagatcacatcaataggctgggcgcagtggctcacgcctgcaatcccagcactttgggaggctgaggcaggcagattacctgaggtcaggagttcaagaccagcctgaccaacatggaaaaaccccatctgtactaaaaaaaaaaaaaaaaaaaaaaaaaaawttagctgggcatggkggcaggtgcctgtaatcccagctacttgggaggctgaggcaagggaattgcttgaatcctggaggcggaggttrcagtgagccaaratcacaccactgcactccagcctggacaacgagtgagactcagtctccaaaaaaaaaaaaaaattcacaccaataaatatgaaactacaacgctgacaagtgctgtaagagtgtaaagcagtatgtcttgatctagcctgtggctgtgtctctgtaggggatatttgagctgagattgaaggataatcagttacttgtgagggggagaggggacaaagcagcctagcatcgtatggcaaggaattaattcatgcaaaggccctgtggttgaaggaagtacatgagcttgggaagctgcaaggaagccagtatggctggaagacaggaagtgcaggggaacatggcatggtggtatgagagacagctttagagataggagggccagaccatgcaaggccttggcaaatgcaaatgaaacagactttcagactctttaaatgagaaacccagcagattcatatacgtgtacttaataacctgcatgcttaggagaaaagattgaagtgccactaatgctgtttaataaatcttataaacatatgattaaaaatcggctgggtgcagtggcttacacctgtaatcccagcacttttggaggccgaggcaggtggatcacttgaggtcaggagttcgagaccagcctggccaacatggcgaaaccccatctttaccaaaaaaaaaaaaaaaaattagccaagtatggtggcacatacctgtaatcccagctactcgggaggctgaggcatgagaatcgcttgaacccaggaagcagaggttgcagtgagctgagatcacaccgctgcattccagcctgggcgacaaagcgagactgtctcggaaaaaaaaaaaaatttwaaaaatatcaattatcacactattaccagggcaacaaattatcaagtaagacaaccaattagaattacacatttagtttaggaagttgaaggttatttttatgggatactgtaacaatttctgaagctcacctgtactttcaagaatagattcatattaactgagaacagaagaaaatggtaacaattaaggaaaaaaatctaattatycttatcagacagcaacataagatttctagtcttgtggatattatcattttgaaaccttttcaaatcagagaygttaaactatattttatggcacagaatggtatctctccttcggtagctgcaggagataaaattaattcctaatatttcagagatgctgttttgctagtaattagtagttaagaagacttttcactttttaaatattatactccaraattccagtgagtagcattttataaaagaacagaccacagggaactcaaagtttactaaatggaatagagaaaaggcagaagagggttttatttaatacatatggtgtcgagggccaagtgatgtctttcctctatgccagtggttctccactgagcatgagtttgccacctgctccagagacatttaggagtgtgcagacgtttttagttcccacaacttgaaggggtggaaaatgctactaacatctaatggatagaaaccagagatactgttgcacatcctataatacacaggttggtgcccctccccaataaagaattgtccagcccaaatgttagtagtaccgaggttgagaagcccagtgctacctcttgtaggtcatagtaggtatgtaccagttctgtgcaaataagactacctctgtcctcatggggcttaaagacctgtagaagaaaatctacaaacaaataagtgctatggcctggtgcattctatcaaggaggtcagaaaggcttcattggagaggtggcactggacgtgagttgatcacagaatcctgctctcaaacacagacaccctcaggagatgccacaaatgctaattctacattcgtctttagaggaagacagaggcagtgaaaagatcaacagagttggcccagtgaatatagctagaaccctgggaaggaagggctcacagaatccaggcagctcttagaagcagctcagagctctgagaagtgggtatggctgagcatgtacctgagatatgaagaaaggacatgggctttggagtatggaagacgtgactttagagccacactgtgcccttcaatagttgtaagacctggctaggtgcggtggctcacgtctgtartcccagtactttgggaggccgaggtgcacagatcacctgaggtcaggagtttgagaccagcctggccaacatggtgaaaccccatctctattgaaaatacaaaaattagctgggtgttgtggcgcacacctataatcccagctccacggggggctgaggtaggataatcactggaacccaggaggcagaggttgcaatgagccaagatcgtgccactgcactccagcctaggcgacagagcgagactccrtctcaaaaaaaaagaaaagaaagaargaaagaaaaagaaataaataaataattttaaaaagtagttgtaagacccagagcaagttcacctttctgttaccagggcaacctcagtctcttcatctgtaagaagaagatagtaggagtccccaactcgtagggycaatgtctagactaaatgagatcatgggggcaaagcattggcatacattagctgttcagtgaagccttcttccttcttttcccacttgatacgggggaaactagacacaaaaggaaattctcttgattgcctgcaagctcttgagggaggcagaagagagggcagaagtcacctgatactcaaaccatcttagttttttacccgtctgctagggtctcccttgacctttgccacttcatttctctcatatagtttctgaaacctcccagcagtgaagtgctgtgcatccttggggctggggtccaggcctacagccattatgagatcttcacagagcagttctcctttaaggaggtaagtccaggggtgggggtgggagagaagagggaagsgggtggtccttgacctgtctatactgcttcactgcaccacaggttattctgaaataattaagttgtgagccccatctagaccattcttgtatcttcatgacttcccagaagccctgatggaggggatggaggataagagtcaggggaagatctgattacctgtttccagtcctcagttcagagggcatttgtctgaggatacagcaagcttactcggttaaaagattctattatatctcttgtatacattcagttgtccttttagctcctgtctattatgtttttcttaggagaatccrgagtttttaagtattcaaggttrtggatcaagaaactgggtgggatgagacctggagaccaggaggccacagcctctctcttttgcagtctccatactggtccaccttccccccactgcgtctcatgcttccccctgggaatttttgatgctattgttattttatgtgtgtgtatgaaagggatggagcagttttaaagtatgatttaatgatgaaaataaaaccactgccttgagaaatatagactattaggtgagtgcaaaagtaattgcagttttggccatgactttttttttttttttttttttgaaatggagtctcgcgctgtcgcccaggctgsagtgcagtggcataatctcggctcactgcaacctccatctcctgggttcaagtgattcttgggcctcagcctcccaagtagcttggattataggcgcccactaccacacctggctaatttttgtatttttagtagagatggggtttcaccatgttggccaggctagtctggaacttctgacctcaggtgatccacctgccttgtcctcccaaagttctgggattacaggcgtgaaccactgcgcccagttgccattacttttaatacaaggaagaaaacaaaagaaaaatgccctttcatctgttttcaaagacagttaatgttttctgatcttccctcttcagctttttataacatagctttagtcacgttagatatgcaccattttatatcctctcttactgaatgttctaacatcacttttcaggttatctaatttttgcataaaatttgcatagtcttctatcaagaagggtgaagaggttaaccatgcacttccggccgggcaaaatgtcctgtttttcaccttgcttggtgaacttgcttagacataaagtttgtttccgtatgtattatatttccttatgagaaattctgtaggccttattttcagttgacgggtgacaagcccttgacccaaacattgaaacctgtcaagcaagtcggcaagtccccagctcctggtgaggccgctgccccaccctccaaccccagcacctttcaggattccagccgtagctaccattcttggccttttcattggctatgccatttaccttcaaactcgtctgatcttgaatttcctaagtattcttcaccgatcaagttattccatgaaaaacattatcataaataatccttcatatgaatctcccacccattacaactcctttacggggtctcagacataaagtgtgagttccacacagactttgccagttatatttccattttacagatgtggaaactaaggctgaatgacatgaagcaatttcaggaaatagcagagtggagattggttccaagcctacctggctccagaacttgctctgctaatcattatgctattaatatataatagctatgaagttactraggctgtgcctcttggcctagaagtgaaatacttccactcattttaaaaggggaaagtggtagagaacgctgattttcaaatacctggctaggtgtctaagttaatgctgtacccctgatcaaatgtccattctccatggggaatgatttaggagtgatttagataaccactgacccctatgccagagtagttcaactttccctccgcatccctgggctcagtgtaacataagcagccaaaaaatggcgccaatatccttcttgttaytcycaatgaaggtgaggatatggaaccgcaccaaagaaaatgcagagaagtttgcagacacagtgcaaggagaggtacgggtctgttcttcggtccaggaggctgtggcaggtgcagatgtgatcatcacagtcaccctggcaacagagcccattttgtttggtgaatgggtgaagccaggggctcacatcaatggtaagtagagtggctccataaggcatgatgggtggtggccaggctcctctctasacgggaccagtcgactacatttgcagagccagtttattcatgcagaatgcccaagctatttaagggccttgaaaacatgtgagattgaaaaaaacaatatttggctgggtgcagtggctcatgcctgtaatcccagcactttgggagactgaggcaggtggattgcttgaggccaggagtttaagaytaacctggtcaacatggcaaaaccccgtctctactaaaaatacaaaagttagccaggcatggtggcttgcacctgtagtcccagctactcatgaggctgaggcatgagaatggcttgaacccaggaggcagaggttgcagtgagccaagattgtgccactgcactttagcctgggcaacagagagagactctgtcttaaaaaacaaacaaacaatatttgctccaaraaatgtaaaagggaaattacaaacctgaaactaaagaatatttaatgttctataaaatgtaakttttttttctttttttgggacagggtctcactctgtcgctcaggctggagtgcagtggcgagatctcagctcactgcaacctctgcctcctgggttcaagcgattctcccacttcagcctcccgagtagctgggactacaggcatgtgccaccatgcccagctaattttttgtaatttttggtagagacaaggtttcaccatgttggccaggctggtctcgaactcctggcctcaagcactctacccacttcagcctcccaaagtgctgygactgattacaagtatgagccactacgcctgaccataacatgtaaaattatggcaaatggtaattcacagctcaattctaaaatgtgatgaaatttaaatcagaaaggccaaatgagtcactttttcttaacactaagaattataaacctttaaatttcttttgtactgtaattttttatgtgacatgtatatgctttttaatatgtgtgataggatgaggggcaggagagggggctctagacatgagggtgcctggggcctctgtagaccttcagatggccctgggtgttatagcaagagctggtctacatctaatactactgcaggtgctgtcatgaattctttgtataattctttgtatattaaatgacattattctatgtataatgtcatttaatacttataaccaacttatgaggcaggaactattatcataaacattttatagggggatgaaccaaggcatggagaaattatataacttttccaaagtcacaagtttttgtttgtttgtttgtttgtttgtttgagatggagtctcactctgtcacccaggctggagtgcagtggcatgatctcagctcactgcaacctccacctcccatgttaagtgactctcctgcctcagcctgccgagtagctgagattacagacacacgccaccatgccagctaatttttttgtatttttagtagagatggggtttcaccacattgtccaggctggtctcgaactcctgacctcaaatgatccacccgcctcagcctcccaaagtgctgggattacaggcgtgagccactgtgccaagcccaaaatcagaggttcttgatggcagagctgggatttgaacggaggcactctatcctcagagtccaagctttaaatgatactcatgattgccttccaacaggaagactggattctggtgagcagagcaggcaaattttagaggatttaaagatggtcttggtgccctgtgttttagtgacaagcacatggtgtgaactcagaagctaagagctttgcacacgtgggcagatgagccggcgagagccaagtcaaatgatgacgcattcaatcatacatgctgactgaatctctaccgtgtgccaggcactattctagatgccagggatgccacaataaccaggcagtcaaggtcactggtttcatggtggttaatttcagtgaggagagatagacaacaaacaaacacatagaggaactagatcgttctggctaaagatgagaccggaaagaacaaggccctgggtgatagaggctggtggtggaggtggaaggtagaagcagagagaggtgttttcaatagggttatctgagaagctctctaagatgtgttttttgagctgtgacctgaatgaggaggaagagcagccatgccaagagctgaaggaaaggcattcagggtagagggcacagcagatgcaaaggccttgagtgtggaagcgaacatggcgtgtttgaggaatggatcaaagtaatttgaaagtctcaggctgcatgggactggtggtcagactgggtccagggaatgggtaagaggtaagtcagggctgagtttatggacaataagaccatttctggaaggacctgggaaatcaaaaggaaccagttcatggtgaaatgggtttccaaggctgcatcttcagaaagatggacttgatttttttttcagcttaaaacaacacattattatcatctcacagttcccgtggttcaggagactgggtgtgggtagctggatcctctgtgcaaagtctcacaaaaaagaaattgggcaacatccgggctgcaatctcatctcatgctcgggggtcctcttccaggctcccatggtgtggcaggattcagttccttacactggaggatggggggagcccctttccttggggccattctcagctcccagagatgacccaaatttcccaccatatggactctccatcctcacatccagccacagacaatctcccttatgttggatccctctctcacttggaatcattctccaggaagggctgacttgattttgagtcaaggcatctcttctgttttcctggcccagggacaaaattggtttatgtgttcacagaggcaacacatacatttaagaaaaatgtgtcacaagcgcagacaacagggaaataccaacaacagattttacttagtttacagctcagcggagggacaggcccagttccaccctgccccatgcctccctcctcctgcccccacacccygtcaagcctgtctgcgaccctcactcatttagccccatcacaaccaagccagagccttgtttgagtcaggcytctctctctttactgcctggcccacctccatccgcctgagtgacctcacacaaccctttgagaactcgcccggctcataagcagtggttgtgcaggggaaatagtccagtgagaaggagtggcctgagaaacgggggttttgttcccaccagcttatgatttatttacaagcttccttagctagtgcttttgttctatagaactctccgcacaaacaaccttcaagatggacatttttacacaactctctttggaaattagaatgagggagaacagaacgggagggaacaaagggagaaaacggggcggcagtggaagaaggcatataaatgctgtcttatatttgtataaggctttatagcagttttcaaagactagccagccaggggctggatccagccagcagatgtgtttggtttggaccatagagtaatctaaaactcaaggagtgacatatgcaaatagatttcctgtttctcttctaagaaaacaactggggcatatctggtaacagtggatctacattcacacgtggtaatgattagctggagctgaacaatgactgtccccttcggaagggcctgctggcttccccgcccctcagtctccaccacatctaatccagtccctctgaccagctttgttcattttcattacctccctggccttgcaggcatttggtggcagcctctgcattctcctgtgtcctggtgccagggggcgtgacaccttggattcatcattctggtcctggactccatagaggatgtgacagttcagggccaggacggagccagttttctttctgacgagacttctccatgaccctgacactgagtttttgttgttgttgttttttttcttttgtcatgagttaagagagaaccgggggtgaggagagggaaaggggcatagtggcaggcgtctgtggtcccaacagttkgggaggctgaggcgggaggatcacttgagctcaggagtttgaggctgtggtgagtttttgtttgtttgttttttgagatggagtctcactctgtcgcctggtttggagcacagtggcgcagtcttggctcgctgcaacctccaactcccaggttcaagagattctcctgcctcagcctcccaggtagctgggattacaggcgtgtgctaccatgcccagataatttttgtatttcagtagagacagggtttcaccrtgttggccaggctggtcttgaactcctgacctcaagtgaaccacccacctcagccttccagagtgttaggattacaggcatgagccactgcacccagcctgtggtgagttctgattgcaccactacactccagcctgggcaacagagtgagaccctctctccaaaaagaaaaaaatagatattaaaagaactggttgagggtgaggaatgggaatgatggagatcaagaggagagtgaggtgtgaataagcaccaagtgaygtctctgtttcgggatttttgtgaggaaggtgttcctgttaagcagaagaggtgtgagcgcctaggtgctctctcagacctggattcacccatcagatccttaaccttggcaaacaccttcacttctttgagcctccattcgtgcatctgttaagtgagaaccagactttgaaatgtacttgcgagaaccataaatagtacgtgcaaaacatcccacagagagtagacaccctgtaaatgaatgctatgtcgtctcaaaatcttttagcaatgaggtgggatatagaatagaaaggcaaaatggtaggtagttttttttgtttgtttgtttgtttttttgagatggagcctcactctgttgcccaggctggagtgcagtggcatgatcttggctcactgcaacctccgcctcccaggtttaagcaattctcatgcctcagcctccagagtagcaaagactacaggtgtgagccaccacgcctggataattttttgtatttttagtagacacagggtttcaccatgttggccaggctagtctcaaactcctggcttcaagtgatctgcctgcctcagcctcccaaagtgctgggattacaggtgtgagccaccacacctggcctatttcttaataagtatttcgtcctactgattgggagagcatggcctggggaatgagggggtattttgaatctgagtgtgttcacgagtcctttgttcacctctctcctgtgctttgggcttcttagcagcctttggcactaatcctgggcttaaggtctgttttgctgtctcttagctgttggagccagcagacctgactggagagaactggatgatgagctcatgaaagaagctgtgctgtaygtggattcccaggaggctgccctgaaggagtctggagatgtcctgctgtcaggggtgaggcccttctgaccccagtcagggctgccacctggctggcctcacctggatcccagggtttcattaacytcccttccagtttggtctgctccagacctcagccaccccacctccttgtaggggaaggagctcctaaacattttgcaaccctctttaattccattcyagaaaaatatgggcattatgggtggtgacatgtgtgttcctggaaggagaagctcagtggattttatttttttgctgggctgtcctctaaagaagtrggattggaagcttcttgcagcctggaaaccttcccaatgtggccaacatgataagactgtgttgcccaccttctggcctcattttacggttataatcagcataaaacaagaagggagctgctggcatgcatgttcagataacagcatgtctatttcctcactgacacaatgatcttggcaggacagctccctgagcaccaactcgaatctctgtgtttatggtatcacaaaagcaaatgccaccccaaaaggatttcggggccagcctcctccctaatatcattcagtgtacaaaggatctctctcttttttttttttttttttaatcaaatttatctcttatccaattcaggaattccctgggctggcttcaaaagccaaccctgcacagactttagcttcatgcctgggtcagcgtatgtttgtttcctaggccgagatctttgctgagctgggagaagtgattaagggagtgaaaccagcccactgtgagaagaccacsgtgttcaagtctttgggtaagatccattgctccctgggcacaaatccaactagcgcacaaggcaggttcacccattggtggaaagagcaatgagtcaccagactctgcagctgaatcattgtgctccatcattcaggtcaattatttacatggtttagcctagtgctaagcccatgaactctggaactgagcagtcctgggtcagagtcccttccccgccactcaraggcaggtgtccttaggcaagtgatctgacctctgtaggcctcagtttcctcaccacctgttaccattgaggattaggtgggatttgcatataaaatgaatcagttcggtgcagatcttgatgaaattcagaaggtacccttcagaggtggagggggcaggggacaaagatgttaaaagacaggaaccttaagggaaatggcagagacccaacctgaaagagtcagatggaaagtatagcctaagccctgttcattccctccttccctactctcccacttgctgctttgaggagggcttccatggggagccccctaccacctgagttgtatggggtaccttatagaagcccaacaaagggtgggctcccagtggccagtctgtcccttgccccaggtcctcttccaccctatgagattgaaggaaacagaagtacatgggaacaggctgagctcggtggctcacgcctgtaatcccarcactttgggaggccaaggtgggcagatcacttgagctaaggagtttgagaccagcctggccaacatggtgaaactccatctctactaaaaatacaaaaattagccaggcgtggtggtgcacatctgcaatcccagctacttgggaggttgaggcaggaraatcacttgaacccggaaggtggaggttgtagtgagctgacatcrtgcactccagcctgggcaacagagcaagactccatctcaaaaaataaataaataaagtacatgggaacagagctgatacacctaaaacactgaaatactcccaaactggttggtaaacagttgctatcctgagcccctcgagagtgccctctgtccccctctcatgaccttccatacttcgtgatcaagcagcaaaagagtaaatgcctggcagagcatcaggagcgctctggccacccagagcccatgccattggttaagtatccatgccttgcaggttggtaaatgtctttaaaatctctcatgcactggaagayaaaggcaatacaattttatctggagcctggttcaaagacatcacatggatccagttttgtctgaaaacttcaaaggtcatggcagatcagaggtcagccagcccytacttaaggagccaaaatgctgcagaaacttgttctgtcctttttggcaatttttgctttcttacttttggggatcagtttattggtgcattgtttcatctaacagatgcgtatcaagcacctaattatctgtgctgggtgcagaggttaaggtatctaccaaaattacaagacaaaggggagatatcaaaggatgcagcattcaaactggaccaagcgtcagaaaactacagtcctggggccagacctgctctgctgcctgcttttgtgtggcctatgagctagaaatggtttttagattttcaaatgaatggggggagaaaatatttcatgatgtctgaaaatgatacaaaattcaagcttcagtcccatcaataatttcactggaacacagcccacagccaggctcttttgtttacctgttggctgtgttttctactctaaaggcagagttgaataattgtaatagagaccctgtggcccacaaagcctaaaggatttactgtctgaccctttttgaaaagtttgttcaggccaggcgtggtggctcatgcctgtaagcccagcactttgggaggccgaggtgggcggatcgcctgaggtcaggagtttgaaactagcctggtcaacatggtgaaaccctgtctctactaaaaatacaaaaaaaaaaaaaattagccaggcatggtggcatgcacctgtaatcccagctactcaggaggctgaggcaggagaatcacttgatcctgggaggcagagtttgcagtgagccaaaatcgcgccactgcacttcagcctgggcaacagagcgagactccatctcgaaaaaaaaaaaaattaaaaaaaaaaatttgctcagccctgagctagatttagaaagatgcacaatttgttggtgggtgtttcttactatcatattctctgcccctttgcagacaattgaagcctgagctcatctctgggtatcagtccctgttattccaataggcattggcaacatggacatgtatcaggaaacttccagccatggggcctgggttgtttcaagaaaagttgttttgaccaaaggcgaaccaaatttctgtctattctaggaatggcagtggaagacacagttgcagccaaactcatctatgattcctggtcatctggtamataaaacaaaggaacttgatgttgagatggatgcttgaggaatattgctgctggttctcataatttctagagtaaatgagggagtccagtccccrgygaactctccttttgtgcttatcatgttttaccttaaatgctgagatcctcatttatgtttgtagttggaaagcaaagctaggtagccatttcttctgttctaccaagttataatagcattcatttccctttatatttccctgaaataaagcacattccaattgtgcagtgtttgcttcggtaacttctattactatcacaaggaaactgagagggatcagatgctcccatttactccctgggggagctacactggctataatgaaacttcttttttatgtatttatttagtagttacaactcacatactctaagatccactagtttaaactatacaattcagtagtgtttttttttttttttttttggatggagtttcactcttgttgcccaggctggagtgcgatggcatgatctcggctcactgcaacctctgcctcctgggttcaagtgattctcctgccttagcctcacgagtagctgagattacaggtgccacgccaccacactcagctaatttttgtatttttagtagagacggggtttcaccatgttggccagactggtcttgaactcctgacctcaggtgatctgcccgcctcggcctcccaaagtgctgggattacaggcgtgagccacggctcccggccaagcctggtcatttcttacaagtgaaattctactatatgtagtcttttgtgcctgactccttaatgcttagaggaaaaatggaatttctgtatagatcagggctcctttggtcataagtggtagagactacaactcaaactaccttaagctgaatgaatggagaatgagatttattggctctcgtaattaggaacacacaggtaactggtttcagctacagctgtattcaggggctccaactgtcaccagggcctggtcttcttccccgttggctccattatcaagttctccctggtagtggcaggacattggtcagcagctcctgaattgtattctgtcctctttagcaactgagcataaatattctcttcctttacagttagatgttccagaactgagagttactggaccatctaggtcacatgtctattcctgagcctaacattgtggctgaaagacatggaatagacggggtgaggtggttcatgcctgtaatcccagcattttgggaggctgaagcaggaggattgcttgagcccaggagttcgagaccagcctgggcaacatagcaagaccccatcttttaaagagatggaataccctggccaggctcaagccttgtacctatccctgaaccatcacgttgtccagggggatcagatgctctggttatccaggcctggatcacatgcccacccttgaagtcagaagtgtcatctgcgcatctgcccacatgagctgatggagggaaggtgtctcttaacaaaaagaggactgggtagttgaaaggcaaaatctaaagatgtccactacagtatccatgttaaaagggccattaaggatcagctagtcgatcttcaacttacggatggggaaactgaggtgcagagatactttctccaggccccctgaatcactagcagaaccgtgttgtccttgtcctgccaaaggccctgtccaaatcccactccgaccctagcctcaccccaccccttcgctttttgctactccaaggctggttttcagataagtcagcagcaaagcatggctctgttttcctgaccatactcctcctgggaaggactcatgctccagatggtttagccaaaagtttatcatatttgccagactgtctggacaggggtctttgtgctgaaacaaaatacccacattacccacatgatctgattctgcatatctcaagtgactatggagtctttctgaggaatcctgatggtcactaccctaaaggatatatagagaagagcatggaatgatgagaatattcatatatcttttctttcattcttttcgcaagagcccctatcataaccctgtgctagcttactaagatacaacagaaaagtagtcctcagccccagagaacacagcctcgaagagaagacagatgttaaaaaaaaaaaattacaataatttggtgttacaggaacatggttcagggtccctgcaggaaatgcagatgttccttgacttatgatgcagtcgtgtcccaataaattcatcaaaagttggaaatatgtggccgaacatggtgggtcatgcctgtaatcccagcactttgggaggccaaggcaggcggatcacctgaggtcaggagtccgagaccagcctgggcaatatggtgaaaccccgtctatactaaaaatacaaaacttagctgggtgtggtggtgcacacctgtagtcccagctactcaggaggctgaggcaggagaatcacttgaacccaggaggcagaggctgcagtgagccgagattgtgccagtgcactccagcctggttgacagagcaagaccctgtctcaaaaaaagttggaaatgtgtcaaaaatgcatagaaaacacctaccaaacatgatagcttagccttgcctaccttaaatgtgctcagaacacttacatttgcctacatttgggcaaaatcatctggtaacacggtacactgttcactgtcaattgattatcctggtgatcacatggctgattggaagctgtggctcgctgcctctgcccagcatcctgagagaatatcttaccagtttctactgaatgcgtatcattttcacaccatcgtaaagtcaaaaaatcttaagttgaacgattgtaagtggggaactgtctgtagatgccacactcaaaaggtgtgattgaagagaataaagagactgtttaggaagaagcaccccagggttagcaatagtaggaaatcactaccactgctaagcttgaaagagcagttagtgaaacccagaaacaactagagctatagcagagggctgccagatgggagaggtgagcttagatgaaggcagctgctgccctgaaaagaagaaacaggtagaataaatgcctcaatctttctttctcccaccttctggtatcttgttagtaactcccattggccagacccaaccaggatcccaagggcaagggagccctttgatgcagtccagagcccaaccacctgggacacaaagtaggttggaaaatagtagagagaagttctggagaggcaaacaaagagagcttgcacagataggaagctactcaacccagactaggggcaaagagagagggtatgtctcccagtgaggatggctatatggaggaagacttttccaggcagaagggtgatggtatgctaaggcacaggcatatgagagacatgtattcaggaagccacaagaaatctagtatagctgaaattaggggacagggagaggagtggtcagagatgggaccagaggtttggaggagagaatagggctctttaatcatgcaggccttctgtgtggtggtgagagtttgaaaagcaatggtggctgagcccagtggctcacgcctgtaatcccagcactttgggaggstgaggcaggtggatcacctgaggtcgggagttcgagaccagcctgaccaacatggagaaaccctgtctctactaaaaatacaacattagccaggcttggtggcacatgcctgtaattccagctacttgggaggctgaggcaggagaatcacttgaacccaggaggctgaggttgcggtgagctgagatcgtgctattgcactccagcctgggcaacaagagcaaaactgcgtcttaaaaaaaaaaaaaaaaaaaaagcaacagtaaagtagaaagtgacaagagacttacatattaaaaagattacgtgactcaaccagccttgtggagaatgaattaaagacagataaggatacttacagcaatccagtgagtgatggttgggggcaggaaccaataggtcatcttgcaaacatcaaagaggatttagctctgagacatattgaaaagttgaaagggcctggtgaccaattgggtgatgaaaagaagtattgggttaaattttccatttatgaaaaatgaagatttagagctgcatgttttaatgcagctgaaactgagcacgatcactatttgggtctcgataattcattgtggtggtgggctgtcctgtacattctaggatgtttagcacccattgtttctacccactggatgtcagttgcaccactgttcccctatcatggcaatcaaaaaatgtctctagatattgccacatgtcctctaggagacagagggcaaaatcatccaagttgagaactgacaacctggaagaaaatgggttcagtcctggacacactgagtatggggtacttgtgagacatgtgagaggagatgtcagattagatttgggcttaagtatttggtgcccaaagcaatggtctgggctggtaacttggacttaggaattctgagcatataactgacctgtactacacaatggcctgaaatataagcacaatacacatttaccacactataacttctcaaactctcctcttcggtgaaatgctcccagctgcttttccctcttgttgacttttatgtcaagctacatagagggggaaaagaggggccaggaggtggtaggggtgaccagatattggattgagctactctaagcatctagtttaagagatggaggtctgagatcagtgagtacttgaagctcatcctggctcataatcctcttgtctttgtctcttatcaaggcctttgtattgctctggcatcttctcttagcccctgtagttggtatttagttcgaaagatctggaattcttagaacattgataacatcttataacatggtataaacctttttttattatataacaatactctgtgacgaagagactatatccttgatgctgagaactttggagaacgctcacctattaattctgtcaatcataaaagaaaagaacccctaagaagagcatagaggtacctgatgagacccctagtggcaaatatctcctaaaaagggatgagagtcaatgttcaagttcatttctaccaacctgagtgatggctctcttgctatgatgtagttacagcagggggtggagcaaatatctcattaggcagattccgggcaataggtgaagaggggattctggcatctatgatgatgaaatataatagtggcaggcacagactacaaacttttttgagcactttctatttgccaactgcttctgtgcacgttaatgaaggaaagcacaacttcagtttattccacaagataaggtatttgtaaacaatcatcccctaatgcaacgtgtttattcaatggctaacaagctttctgaatatattcattgaggaagaataagccaattgttcatcagatttgagcatctgtatcctccctaaacttgaatcctccatgatgcctcttgaagtaacccaaacagatgtgcatcagaaagcaagctgaagataaacagctgtttctgtattatacccagaatcaacagtaaattccacttgatgtaagtcagcctgtagagatctaatgaagcttagctattcagtggggtttcagtttgaatttgggattgccattgaaaaaatgtcagcagcagtgttgtcagtttcttttttctttttttttttttttttttttgagatggagtctctcttaccgcctgggctagagtgcagtggtgcaatctcaactcactgcaacctccaccttttgggttcaagcaattctcttgcctcagcctcccaagtagctgggattacaggcacacgccaccacacctggctaatttttgtatttttagtagagacgggtttccgccatgttggccaggctggtcttgaactcctgacctcaggtgatctgcctgcctgggcctcccaaagtgctgggattacaggcatgagccaagtgttgtcagtttctatcgtggaacctacacatattcagatatgcggcaatggtgacagacaacagtaaataaaccatgtgtacataataagcatgaaaatgtgaaatttcctttgacaatcaaatcttccctccaaagaacttagttttttttccccttaagtttcactaggtgtttacccttacaaaactcatcaattgcagttggacagactttttttctgtatttttcttggtctcctccccaaccctcttacttaggacagtattattctgctaggactgccataacaaaatgccacagactggatggcttcaacaacagcagtttatcaaccgaagtttattttctcacacctttgggggctgaaagcccaagatcaaggtgattgcagggttggtttctcctgaggccccctcctcggcttgcagacggccaccttctcactgtgtcctcacgtggcctctctgtgtgccttccacctaagtgtctcttcctcttcttaggacaccagtcctaggccaggtgcagtrgctcatgcctgtaatcccagcactctgggaggccgaggcaggtggatcacctgaggtcaggagtttgagaccagcctggccaacatggtgaaaccccgcctctactaaaaatacaaaaacttagccaggcgttgtggtgcaygcctgtaatcccagctactcaggaggctgaggcatgaaaagtgctcgaacctgggaggcgggggttgcagtgagctgagatcacgccactgcactccagcatgagtgacagagcaaggctccatctcaaaaaaaaaaaaaaaagggaaaaaaaggacaccagtcctacaggattagggttgcattcttatgacttcatttaaccttaatcacttctttaaaggtcttatttccaattacagtcacattaggggttagagctccaacatatgaatttgacgcaattcagtccacaacaggtaccacctgtattctatctctttcttcactctccccaccaccactctgtctctattctcaggcaggagtattatagacgcatttccattacttgtaaacatgtacacatttgttaaagggttagatgcatttaagttgggcatcaagccgcaggccaggaaagaactctagtctctaccactaggcaaagtcatagatctmaggagagaaaaagaattggaattcccaggttacacagatcggaaagcaagcagcaggataatgtgatgagattataattttaaatccagagatagaaaagtaaaggaagtttctttcattttcctgtcatgcatatgaccctttctttattcaaaagtatcaaaaagataggctgggtacggtggttcacacctgtaatcccagtgctttaggaggctgaggtgggaggattgcttgaggccaggagtttgagaccagcctgggcaatgtggcaagaccccacctctactaaaacatacaaaataagccaggtgtggggggtgtgaacctgtagtctcagctacttgggaggctgaggtgggaggagatcatttgagcccaggaggttgagaatacagtgaactatgatcacaccactgcaccctagcctgggtaagagactgagaccttcatctccaaaaaacaaaacaaaacaaaacaaaacaaccacaaaaacaattatatgtacatataagataactgaagagaaatgccagattcttgttatgaagtctcctcaagtttctcatggagatttatttggatgggcatagcctacctcccagagtaaagtttgggtctctctctcaggtaggcatttccgatgccctagaatccattcccagtggtctggcattgggtaaagagggggtgccgcctggagtgctgccagcgggccacagcatcaccccaatgctccaggccaaaactctccatcacaggctggtgtcgaccagctgcccaggctgttgaagcacctgcttcctcctgttgatagcattcagaactttcttcctgggacccagctgcatttgtatgctctgaaggtcctcatcagagcagagcagcagagcttctagatcaatctgctctctcttgaagataggcaggaattcttccaggtgctgagacagcaagaacacttccaggggcgtggcatcgaccacatcttcctcccactccacttcatcgtcatcccacggcagatcatctttgaggccgttttcctctccctcttcatcagctgcaccctcatcagcctctgatgctccttgtctttgaagcaattcactgggcagtttaaaaccaaactctctcttgctatctgagatgtcttcaggactcgatatcctgttccttctaaaaacaatacttcctagacctggacgattgagaatggattcatggtgcacactgccgtcctcctctgctgacaactggagcttctctttgaagtcccctgagaacgagtcttcctcttcctctctgaacacttccatcacgttcctctgcccacttctgccttccttccccacctgttctgctgtatctttgttcttcttgaacttgatcttgaaagtgtctttaatgcccttagatagtgacccgaatgtgccaggagcagaagcatttgaaggggatgatctggagaaggtacccttggaagaagagagagtcccggattcctccttgctgtaggtgtgggccatcttattttggtgcttctcctggagcctctcacactctttgatctgcctcctggcattcttctgagcctgctccttcagcctggtgaccttcttggggttcatgatgttctgtgcagtggcagccttgtccaggagagcaacacattcattctgctccctgctggcagcagcatccagtggagtctgtaagtcattatccagggcaaagatgttggcaccaaagttgaccaggaatgagacgcagtgggcatggccattggaggctgcaaaatgtagaggagtgtttccccagatgtcacacctatcagggtcccctctagaagagagagagagaaaaaaaatacatgttggactttttttctctgaacgcaggcccaaaaaaatcaaaacaaaaataaagaacaaaaggcacgttaatacaaacatgttcatcctgacttgacattgttataagatactggctgcaagtccaactgtcttagaaccatcccatcttaaaaccacatggccagaaacagagcccatctctaccgtgtgtctcctttttgtttgtttcctttgttttgttttgagacaggttctcactctatctcccaggctggagtggaatggtgtgatcacagctcattggcagccttgacctcccaggctcaggtgattctccctgctcagcctcctgagtagctgagactacaggcatgcaccatgacacctagctaattttttgtagagacagggtttcaccatgttgcccaggctggtcgcaaactcctggcctcaagccatctgcttgccttggcgtcccaaattgttgggattacaggtgtaagccaccgtgcctggctgtgtctcctttttagaagtgagaaaaacttactaagaaattctccagccaaacaactttcttgtctcattggccagcactaggttacacgcctaagagatgggaaacatactattgtgtttaacttagatcaattagattttgccctgaaactagggataggattgttcaatggcttatcaagaaaataataacatcaaaatcctaatttgtagcatgtgccaatttctgtggtgtaaatacatccaccatggcaaatttcaagctaccaatgtaacatcactggacagagtttggaagagatacacagtagcgtaccattatcaactatttcccccatgtagatataatggacatgaatyatcttaagagacaggtaagagtgaaatgtattaaaataagtagaaagtgagactttcgtgttatctttttaatataatttgttaaattataagtttatataattttttttgagatgaagtcttgctctgtcgtccaggctggagtgcagtggtgcaatctcggcttgactgcaacctccacctcccaggttcaagcgattctcctgcctcagcctcccgagtagctgggactgcaggcacccaccactgcacccagctaatttttgtatttttagtagagatggagtttcaccgtgttggtcaggctggtctcaaactcctgacctcaggtgatccacccgcctcagcctcccaaagtgctgggattacagttgtgagccaccacgcccagcctgtaattttatttttaagaatggctatgttctcagaagctcaggcttacagtaacctatgattgcaccactgtctacagcctgggcaacacagcaagaccctgccttaaaaaaaaaaaaaaaaaggctaggctcagtggctcgtgcctgtaatcccagcactgggaggctgaggtgggagatttgcttgaggccaggcattcaagaccagcctgggaamcataacaagacctgcctccattaaattttttttwwaaataaaaataaaaagtaagaaagaatggctatatttagctgtcaaactttctaaaatttggaaataactctgacaagctggttccagcatgctactgctaccctcccgaattgagccacatgtggggaaataaataactgaaccaaactcagtccccatcagcaggaaagaagaaagaaaaggatgttggagaggtagcaaacagtgtctgttacaaacattattcattaaaagggcattacatctctatttattcctcaacttacttccatgactgcaggttcatataagtgtgtcattctacaagagtttaaggtggaattggggatactattagatggtattaaggccataaacctaatgcctggcacagaacagggacatagtaggtgctccagtatttgtggaatgaatgaaaacctactggaatcctgcccaaggcagcaaaccctcctctcctacaaggacttgagttacaaacaggaacagataaaaagtcgagtaactatttttaatgatggccagagccatgcgccaatgctgagaactctgataatacagatactaaggggtccttcctttgccctaggctagactccaaaatcaggatctcactaaactctggccagcctggccccatggaaagaggacagtgagtctgagaagtcctcttaacattcccgagaagtagagggcagacagaagcagaagagaagatctgcacccttgcaaatgacctgttagtgcgccacgaccattctactagttcctggctgctcaacgttgggtctccagaccagaagcagatgcatcacctgtgagtttgttagaagttcagaagactctcatgcctgtaatcccagcactttgggaggtcgaggtgggtggatcacaaggtcaggagttcaagatcagcctggtcaacattgtgaaaccctgtctctactaaaaatacaaaaattagccgggcgtggtggcacatgtctgtaatcccagtttctcaggaggctgaggcagagaattgcttaaaccccggaggcggaggttgcagtgagccgagatcacaccactgcactccagcctgggtgacagagtgagactctctccaaaaaaaaaaaaaagcaaaccaaaaaaagtacagaagactctcacccagacctattgaatcagaatctacactttagcaagatccgcaggtgattcgtaggctcactacagattgaaaagaacttcactggttagtgtgatccgaccagggtcctataatttgataaatcagatttgcagttactccacgggaatccctggctctttggtgtgtgttagttacaaagaagcactttcacattctttgccttcaaccatcacaatctccctcttagagaaggcaggcaagaatcattactgcaggaataaaataagactcagagagcttaattgatttgcccaagggtaacaggcagcatgatttggatcaggctggtctcccagtcaaatcatctccaatacaatacatcctagattaacacaactgggcttttccattttaccagctacatggcctcaagtttaatttttctaggacttggtttcttcatgtaaaaagtaaaataaagtttcctcttcaaaaactttcctccccatctaattaaaaataaataataacttctcttaaaaacaaaatttattcaaaaacctgtactaacattcttaaatatctactagccataataaaaaaatcaatatactttatactcttaactcccacaatttagcttaaatatttaccctaacatacttatagtagtccaaacaaacattaagtcatagcctgttcctcttccttatttaaaagtgtttttacctttctcaacattccacaaattactttctccttcctttgttctcctctgcctttgcctcttttaaaaagttctaagttactaaccaatcaagacaaatacaaaatgtaaagtcccattccagccaataaaaaccaaacacaacattaaacacatcaagttataaataaccctgtctcctttgttcaatatactctcataacaaaactactaacaaatataccctttctacgaaaaataaaaatagccttactaaaaaaattaaatttatgttcaaatactatttctttgcaacaccaaaagacaaacatttctaacactcatctgtaaattgaagataatactattacctattcatagagttatgtgaattaaataaattaatctacataaagcattggaaaactgcttggcacatagtaaatattgaataaacattacttattatccttgcccttgcccccaaactcataatccttaatttcatgtatttatttttccttgtattcaactagtaaattcctacagcacaataatgcttgtgggtttttaaaaatcacttataggccaggtgaggtggctcatgcctataatcccagcaytttgggaggccgaggctggtggatcactggaggccaggagtttgagaccagcctattcaacatggtgaaaccccatctctactaaaagtacaaaaattagccaggcatggtggtgcgcgccygtagtcccagctactcaggagactgaggcaggagaacctgggaggtggagattgcagtgagccgagattgcgccgccgcactccagcctgggtgacaaagtgagactctgtctcaaaaaaataaaaaaaaaatcaatcaatcaatcacttccagttttaatctgacaaatatttatgccttgtctccttaattggataatatgccccagagggcaaagcctgtgtctctttctcctttgtgtcacccacatgtcccggcagaagtctccaacccaactcaaagaagtccagcaagtcatgtaagtgactgaatggggccaagtttgctctttcaacaaagtcacagttaaatgcatactccacctagaaaggaccacagctcagctaccttgaatcaaagcggaaacaatattgccagagctcccatttttcaaacgaagccacaaatccagaatttcaagsgaaattctgtgatttttaagtgttggctcaaatttaaaagaaaaatatagtaaagtccaaataaaacacatttgtggaccagctccagcccataagctggcaactggtaacctccttctgagcagagagaacagtgtgagcagaggcacagatggctgatattacaaggcctatttggggaaccaggagtatagatcagcgtgaccagagtgtgtggagttgggggtaaggggaaagagyggaaaaggaaagaaaatgaaatcaaatctaaggaaagcaaatattaagtaacacagttttgctgggaagccactttccagaaggctctggtcagtcagcctgayttaattgtttgggatgaaaggagacccttcaaccttggcacagacccgcatcttaagggaccgctgtgtctcccccctaaacatgtggtttcactttttattttaaataaacactagatgcaaaagactccttaagtatcctagacatcaaagagggattgtaaaacacccaagacgttactatcaacagaaagagaaacatactgattaaatttgcctgaagttatccttggattggataagttgaaaacaaaattattgggaggagtgagctgcaggggggatgcagaagggcactaaggtgtccgggttaaatgtatatgcttaagactatagactggtggaattttctcatttcactgaatttttattttgctttaagttctgggatacatgtgcagaacatacaggtctgttacctaggtatacatgtgccatggtggtttgctgcacctgtcaacctgtcatctaggttttaagcccttcatgcagtaggtatttgtcctaatgctctccctcctcttgcccccgaccccccaacaggccccggtgtgtgatgttcccctccctgtgtccatgtcttctcattgttcaactcccatttatgagtgagaacatgcagtgtttggttttctgttcctgtgttagtttgctgagaatgatggcttccagcttcatccatgtccctgcaaaggacatgatctcatttttttttttttttttttttacagctgcacccatttcactgaatcttaaatgatgctttcaagacagaaggaagaacagtacacctgagatgaccccaaaggtgggccttcttttgagaaaatttcaaatgcaaaattccagatttacagatgaaactgtcagtaagacaattcatgggttttcctagtggctttaagctattaaaacttgcaaaactttggctgggcacagtggcttatgtctgtaatcccagcactttgggaggccaaggtgggtggatcacgaggtcagaagatcaagaccatcctggctaacatggtgaaaccccgtctctactaaaaatacaaaaaaaattagccaggcatggtggtgtgtacctgtagtcccagctactcgggaggctgaggcaggagaatggcgtgaacccaggaggcggagcttgcagtgagctgagatcacaccactgcactccagcccaggcaacagagcaagactccgtctcaaaaacaaaacaaaacaaaacaaaaaacttgcaaaacttctacttacagacacatttccaaattgatgtacaatttaaatggaaatattttctacagacaagttgcatggagtccttttaaattccatacttgtcattgttcacatttcttgatagaaccattgcatacaactgcctgggtggaaaactagtcctgtcgtttgataatctgagttcaacattgatgctctacggttttcgtgggctaagctcagtctagtgttgtttttttctatttcccttttccccaaaagagaaactcactgaagagattttaaaataacccatttttcccttgatttttggtagatcagtgcatttgggcaatagtttttaaagctggcttagcactactgtcactaagtaggcaatttgcttaaattaccctgagcatctgttacattccaatttttcctcctgaagttgattttttgtgaagttctcaactattctttcaaaaacgtttttctgcataaaaagaaatatttggactcactaatagtcaaagaaatgcaaattgaaacaatactctgccttttgccaatcagataggcaacgattaaaaagaatagtaatacttggttttggcaggagtatggggaaagaaatactgctggaagaagcagaaagtggttcaaatttcctggcacaatacacacaaaaagcctttaaaatgaggcactcttttgaatctacaattctacatttaggaatttgtcctaaggaaatataagatctttgtgcaaagatgaatgagcaggaatgttcctcccaaacttacttataacaggaaaaagagtgggttcaaattaagcaacatgaatagtcaactgattacatatattatggcattaatctgtgtccatcagtggaagaatggataaagaaaacatggtggctccacacaatggaatactatccagtcttaagaaacaaacggatcctgtcattttcgacaacatggatgagcctggaggacagtatgttaagtgaaataagacaggcacagaaagacgaataccacatgatctcacttaaatgtggaatctaaaaaagtctcctagaggctgggcgcagtggctcatgcctgtaatcccagcacttcgggaggctgaggtgggcagatcacgaggtcaagagattgaaaccatcctggccaccatggtgaaaccccatctctactgaaaatacaaaaattagctgggtgtggtggcacgtgcctgtagtcccagctacttgggagggctgaggcaggagaattgcttgaatccgggaggcggaggttgcagtgagccaagatcgtgccacttcactccagcctggtgacagagtgagactccgtctaaaagaaaagtctcctagaagcagaaagtagaatggtggtaactaggcagaggcagactggggagttggtcaaaggatacaaaatttcagtgagacaggaggaataagtacaagacatctattgtaacacatgatgactatagtttttttaaaaattagttatttattttttatagagatgggttcttgctatgttgcccaggctagtctcgaactcctggcctcaagcaatcctcctgcctcaacctcccaaagagctgggattacaggcatgagccatcatgctcagctcaatggctatagttaataacaatacactgtatatttgaaaattgcctaccaagtagattttaatgttctcatcacaaaaagtatagaagataacacatagtcaattagcttgacttaattccacaatgtatacatatttttaaaaatcacgttgtacaccataaatatatataatttttgttaattaataaaaataatgaaactggccaggcacagtagctcacgcctataatcctagcactttgggaggccaaggtgggttgatcacttgaggccaggagtttgagaccagcccggccaacatggtgaaacctcatctctactaaaactacaaaaattaagtgggggtggtagcatgtgcctgtaaccccagctactctggagacaggcaggagaattgcttgaacctgggaggctgagggtgcagtgaactgagatcgcaccactgcactccagcctggatgacagagcgagagtccatctcaaaaacaaacaaacaaacaccataaaacagaataccatgaagtcattaaagatagtggcatgcattatcccatccctagcaaattaacacaggaatggaaaacccactaccgcatattcttacttatgagtgagagctaaacattgggtactcacagacgtaaagatagcaacaacagacacgggggactatgagaggagggcaacggttgaaaaactatttggtaccatgctcactacctgggtgatgggatcagtcataccccaaacaccagcaccatgcagtgtacccatgcagcaaacctgcacacgtaccctctaaatctaaaagttgaaactggcgtggtgcagtgactcacacctgtaatcccaacaatttgggaggccaaggcaggtggatcgcctgaagtcaggagttcgagaccggcctggccaacatatagtgaaaccctgtctctactaaaaaataccaaaattagctgggcatggtggcgcatacctgtagttccagctgcttgggaagctgaggcaggagaatcactcaaacctgggaggtggaggatgcagtgagccaagattgtgccactgcactccagcctaggtgacagaacaagactctgtctctcacaaaaaaaaaaaagttgaaattattaaaaaaaaaataaaatagtggcgtggatctcaacttttaagtgcaaatggtccatgatatattgttaaataattagaaggtttcagtatagtttatatgattgtcttttaaagggagagaatgtacatgtgtttgcatgtactcaaaggaaaaagtctggaaggatatgtacccaaatgttgataactgtaggaattggtataatttttactttatcaattctattcaatatgatgtgaaatattacaataagtatgtatttctttaagaatcagaccagcctggccaacatggtgaaaccttgtctctactaaaaatacaaaaattagcggggtgtggtggcaggcacctgtagtctcagctattccagaggctgaggcaggagaatcactcgaacctaggtggcggaggttgcagtgagccaagatcccatcattgcactccaggatgggcgacagaagcgagactccatcacaaaaaaaaaagaatctgggggaaaaagtctagtttccattttaaaaaataaaaccaagaaatttcatacactttaaaggtaaaatgaatttttttttgtaattgggccattatgcttcctagtgcaggaaaatacatgtaatgattgttttccatcttcaaattttaaaaacaaaggaaaatagttttctaacaaagccagagttttaatataaatggttgctataggattcgttgtctatcaggtaatgacagataaactcttaaatcatcagactgaaatggacttcagtatttcaatagttgattagcttctaaattcaattttcaattttttttaattttaggttcaggagtacatgtgcaggtttgttatataggtaaactcatatcacgagtgtttgttgtagataattttgtcacccaggcactaagccaacatgttctcatcatttagctcccacttatcagtaagaatatgtggtgtttggttttctgttcctgcgttagctcgctaagaataatggcctccatctccacccatgttcccacaaaatatgtgatctcattctttttcgactgcatactattccatgctgtatatgtaccacatttcctttatccaatctgtcattgatggacatttaggctgattccatgtctttgctattgtgacagtgctgcaatgaacactcacatgcatgtgtttgtttgtttgtttgttttttgagatggagtcttgctgttccccaggctggagtgcagtggcgtgatcttggctcactgcaaccttctccttgcgggttcaagcaatttttgtgtctcagcctcctgaggagctggaattacaggtgtgtgccaccacgcccagttaattttttgtgtttttcttttagtagagatgaggtttcaccatgttgatcaggctggtcttgaactcctgacctcaaatgacccacccgcctcggcctcccaaagtgctaggattacaggcatgatccaggcatgtatctttattgtggaaggattcatattcctttgggtatatacccagtaatgagattgctggctcgaatggtagttctgcttttagctcttggagcaattgtcacactgctttccacaatggttgaactaatttacactcccaccaacagtgtataagtgttcgcttttctcctcaacctcaccagcatctgttattttttgatgttataatagccattctgactgatgtgagatggtaattttcttcccttttcagcttccttaaatctaattggaaatttgacctcacactggttcccaggattagctatggtcaaaaaggcacctcacaagacttctgttcttttttttagcctacatcaggcctgctcaacacagcagatcccagatgcttttgagggcaatgaaacaaatctgagatgtactagatcccgtgagaagaaaggagttgagaaggaaggactaggaaaaacaaggttagaagaatatttgcacccatagccagtgtttaataaatattaatataagcaaattggggggactggatatttatattacattgaaagaaatgatgttaccatgtcaacttagtggagaaagagatagactataacaactaattgtgttggaataaatgagtagccacttggagaatgcagagttagatcataattcagatcttaaattatataaagtatttaaaataacaaatgaaactaaaaatagcactaaaggatcagtcagtattgaggcatgacctcaaagttagaatcacacaacaaagattgatagacttatacgtatatatatatatatttatgtttacatttatatttaaaaatctgttgtcaaaaatataaattgtgtattgtaaaacagttgtaacctatatgacaaagagttgatattgttaactttcaaaagtgtttttatcaatcaaggagaaatggttgaaaaccccaatataaatggggaataaagttataaatacacagttcacaaaagtggcaatccaatggccaattctttttaagcataaaaagaattttcaacctcatcggcaaccaaagaaaagaacattaaagccacactggtgtatcattttgttttgttttgttttgttttttgagacagagtctcactctgttgcccaggctggagtgcagttgcctgatctcggctcactgcaacctccaccacccggattcaagggattcaggagcaatttgtgcctcagcctcctgagtagctgggattataggcgtgcaccaccacaccatgctaattttgtatttttagtagagatggggtttcaccatgttggccaggctggcctcgaactcctggcctcaagtgatctgcccgccttggcttcccaaagtgctgggattacaggagtgagccaccacgcccagcctaatatatcatt

SEQ ID NO: 95755 - DNA, 38282 bp, Homo sapiens
  misc_feature (1)...(38282): n = A,T,C or G
tttgctcactacaacctctgcctcccaggctcaagcgatcctcctgcctcagtgtcctgagtagctgggaccacagatgtatgccaccacacctggctaattttttttgtatttttggtagagatgagtttttaccatgttgcccaggctggtctcgagctcctgagctcaagcgatctgctctcctcagcctcccaaagtgctgggattacaagcatgagccaccacgcccggcctatagtcaccacgcccagcctatatttgtttaataaagtaattcgtgtttgttacaaaagactcattaacagagaattgtaaaataaatgatacagagaaacgaaaataaaagtcacctcagagataattaaaataaaagtacaacttagaggtaatcaccactttcgttttggtctgcgaggcagcagagcatagcggttagaagctcaagccctagtcatactacctgagttcaaacaccaggcttggaccagtgccatagccttggaccatcatcatcatcttggaccagtgccatagcctttctaagactcagtttcctcatctagagagtaattataattttatctcattaaataattgggaggaccaatgaaatagttcaagtacaatgtactgaggctagtacctgacataagtacttaataaacattagatattattgctaatgtattcccatggccttaagctaatgttaaactcttacattagcaaaacacagttctgatcattttacatgcattaaatcatttaattctcacaactttgtaagtgtgtactactatcatccccattttacagataaattggagagacagataaatgatagaaccaagactggaatgcaggcttatctctatactatacagcccgcagtggattttatcaatcattcttttttgaaaccaactccctactcccgaacttaagctgtatctttccatatcagttaaaaaaaatcaattttaatacttgaataatagtccattttctaaatttacctgaaaatttataatatatctgaaaaacattccctattgataacactggttttttaaattacaaacaacattatgatgaacatccttgtacagacacctttgtacatctatctactttcttaggatcaattcctggttcaaatgaactcctgaaagaatatgccagtttgtttttaccaaataaaaacatgagattaataaggtgagactgagcaagatggagtctatatggcggtgagtaaccctggttgccaggcatgggatgtcaagagcctgagttgggtgaggaaggtgtcctgtagaggagacagtccaggactaggagcagaagctgaggacattcatgcaggagggtgctctggtgtggggtgtcaaagcctcagcagcacaaggacgtcacccatacaggaaggaagggagggcagtgagtcctgacatcagatgtcagaaactatttagggtaaggagggcatcaatgctgagggacagtagtggcctgttgcagggtttaaagcctgaacaggatgagggtataaacctgagagggatggtggcagccacctgtcataggatgagggtgctcacaaaggaagatgacctggtacaaggtgatggagccagtgcagggtgacagagcctaagcagagtcaagagggtgtgagggtgggtcagcggcagcaataaggattgatcaaatatactgaagatgttgggtgtcgggtttctcattgttagtgaaggaagttacaaatatgaaaatggactgggcgcggtggttcacgcctgtaatcccaacactttgcgaagccgaggtgggcagatcacttgaggtcatgaatttgagaccagccaacatggtcaaacgccatctccactaaatgtacaaaaattagccaggcgtggtggtgggtgcctgtaatcccagctactcaggaggctgaggtaggagaatcgctgggagggagaggttgcaatgagcagagatcatgccactgcactccagcctgggtgacagggcaagacttttgtctcaaaagaaaaaaaaaaaggagaaaactagaatgaatagaatgaaccctgtattactggatttggattaaagtggagatactgatgtgaattcacataagtaaaatacagaaaaatatttaaatgtaagtatgtgtgtgtgtatacactttcaacttacaaaattttcaatttacgatggatttattgggacgtaatcttattttaagtgaagaagcatctgtattaacatcaccatagcacccaaatctaaatatcattctacactaaaaagaaccaggtaccctaagagaaatgactgattccaggcttggggcagggaaagcacatatgagcctggaatatcttcttgtgccagaaagtaatgacatgctcaaagaatgatgttgtcatgtcaaaaggccacagaagctagcttaatgacaaaatcttggatatttaaagcatcacaatccagtaaaagatagtaacacactgaacaaaataggtaccactgagttcatcatactgataaaaaagtaaatgcataagcccaaagtgtttgaggaagcacattacagacagctgggagcagtggcttgggcctgtaacctcagctacactgaggctgaggtgggaggattgctttagcccaggaattccagactagcctgggcaatatagcaagatcctgtctcaaaaaaataagaatgaaaattacacagagaaaaagataactttagagaactttagtagaaactatcttaatctagttatcaaggttaatatcaccaataatgggacaaatcaaattgtgtacaatctgcaagggagcagagtatcactcctgtgatattcctgctaaagatgtatataacctgaatctaatcaatgaagaaacagacaaatctaatttaagggacattcaacaaaataattggcccaggattattcaaatgcagtaaagtcatgaatatcaagggaagactaaggaactgtttgatggagacatgacaattaaatttaacacaattctagactggatcttattgctaaaaagcgttattcaaacaactacagaaaatttggatggcatctgaggagtagatggtcatgatatatccatggtaatttccaattttgatggttgcattgtgattatgtaggtttatagagaatatataataaaatatcttgaggatgggtagaaaaagaccattgtgtcagcaactactttcaaatgttggttgaggggaggttttgatactattcttacaacttttctaaaagtttgagattgtttcaacataacaaaatatgtgattgtcaatctccttacactaaccacataaacattaaacatttttttgcaaatttgataggcaaaaaaactggaatcccactttaataaaaaaaattttcagctgggtgcagtggctcacacatgtaatccccagcactatgggaggctgaggcaggtgaatctcctgatcccaggagttggagaccctgtctctctttaaaaaaaaacaaacgaaaaaaaaacaaaaaaaagcagtggctcatgcctgtaatcccagaacttgcagaggccaaggtggacagatcgcttaagtccaggagttcaagaccagcctgggcaacatggcaaaaccccgtctctacaaaaaaaagaaaaattagctggcacagtggcacacatctgtagtcccatctaattggtggaactgaggtgggaggatcacttcaacctgggaggcaaaagttgcagtgagccaaatccagcctgggcaacagagggagactccacctcaaaaaaaaaaaaaaaaaaaaaaatcacatccctaatccctctctcacatattataacttatttttatcatttgtctctgcccactagaatataagacctactagggcagtgaacttgattcactgatgtaccccaagcacctaggtcagtgccccagcacatggcagacaataaaaaccaatgaatagctgggtgcagtggctcatgcctgtaagaggcagagacaggaggatccttgtcacaccactgtagtccagcctgagtccagcagagcagagaccctgtctcaaacacaaaaacaaacaaaaaagcccaatgaacgactgaagggatgaatgaagtatatttagttctcagtaaatggtaaggatgatagggataatcagcctttttattcccctattgcagcggtccccaaccgttggcaccagggaccggtttcgtgttagataatctttccactgactgggagaagggctggggggatggtttcggggtgattcaagtgcattacatttatcattagagtctcataagcagcatgccacctaggaccctcgtatgcaaagttcacaatagggctcacaataggtttggcacattcctatgagaatctaatgcctaggtggagctcagggggtaacgttctatcggccaccgctcacctcctgctgctttgtggcccggttcctaacaggccagctgtggacagtgggttggggaccccatggacaggcaggtactagtctgtgcacagggggttggggacccccgccctactggaatgtaaactgcacgagggcaaggaattgtatttttgtgccccaggatatcgatgaacattcctattatgtacaggcagttttttttttgttttgttttttgttttttttttttaagagatggggtccttgctatattgcccaggctggtcttgaattcctggcctcaaatgatgctcccgccttggcctcccaaactgctgggattacaggcgtgagccactgcacccggcccaccatcccagtttttttttttttttttttttttctgagacgtgatttctttcttgttgtccagggtggagtgtaatggcgtggtcttggctcattgcaacctctggttcctgggttctagcgattctcctgcctcagcctcccaagtaggtgggattacagtcacccactaccacgcctggctaattttgtgtgtgtgtttttggtagagacggggatttctccatgttgacaaggctggtctcgaactcctgacctcgtgatccgcccgcctcggcctcccaaagtgctggaattacaggcatgagccaccgcactcggccgactcactatcccagtgacagccaatgacagccttgttgcaggaaggtggtattacactcattcccattttaatgatcagggatcaggttcggagaggccagggcggagagcccgcccgaatccagtgcccccgacggcggttgggcgagggtccgggagctccaaaccgcctagggccgcctgctcgggatccccgttgctcaccttggcctcgggctgactctcctcgagatcccaaccggctttcatcgcctcagctgccccgaccagcttatttggggcctgcctgctttccctgaccttcctggggtgtctctcggtcccttccctctctggctccatggctgtggagaaagatgaggtagagctggggaaactccagcgcccctattcccccgcgtgccgcctcctagcgggagagctacacgggcttgacagctttcaacctccctcggatccgcttctcaattcagtttaccgaactatccccgttcccctaaaaaagcgaaggtgccaacgatctccccgttccgcggactggacacccgcgccgctctaacccaaacggctttaccgtccgcatcggttaccggattctcaacggttccccaacggctacaacgggcgtctgcctggcaaagaaggaaggtgctgccgagcggcttcgccgcctaaaaccactccccacgccccctagcccgggaaacgcagaagagaagacgggcggggagcagaggttctcccctccttagccacagctgccaacaacaaccgcccctcagcctcgcgggctttttgaacggaccggaagtagaagtcgagcgacttccggcagctggacttggaaaagcaaggagtgtcgggaatggcgaccaagcggctcgcgcggtactcgagggagttccgggtcgggggcgggtagctccgggtccagcgctggcgttggccgcagagcagggcacggcaggtggcatctgcggtgagggcctctattccccgcagccccggcgtctgcgacctgccctctctggcacggttggaaaggcgcctccctggacctcggtcttcagccttgggccaccttctacccgagggtgacaggagcccgaggcggacgaaccctggggccttgactgtgtggccttgagccagtgcctgcctattttaggccttgggaaacgactggacgtgacagtgccctgcagactggttggaggtctcaggcaggccacacactgaatctgtcaaggtgttcaacctgttcgaaatgctcgttcctcggtgctgtaaagaaatagaacttaaacttaaatttaatttatttagtaaggccatttttacttcctgcagaaagggtacactcgccagcagttttgccaggagagtacactgaacaaaggagacagggtcatttataacgtggcgcgtccaccctactgctgtgtccggtttcctttggctggaacgggacctcacattctgtatttgtcccgactgactagcaacatagaactttttaaaagaggcaaaggcagaggagaacaaaggaagaaggaagtaacttgtggaatgctgagaaaggtaaaaacacttttaagtaaggaagaggaacaggctatgacctaatgtttgattggaccagtataagcatgccagggcaaatatttaggctaaattgtgggagctaagaacataaagtacattgatttctttattatakctagcagatatttaagaatgttagcacaggtctttgaataaattttgctctaagagaagttactatttattcctaattagacggggaaggaagtctttgaagaggaacctctactttttacaaacccattttctagtgatctttttttttttttttgagacggagttttgttgcctaggctagagtgcagtggtgcgatctcggcttaccataacctctgcctcccgggttcaagtcattctcctgcctcagcctcccaagtagctgggattacaggcatgcaccaccacacccagctaattttgtatttttagtagaaatggggtttctctatgttggtcagactgttctcgaactcccgacctcaggtgatccacccgcctcaacctcccaaagtgctggggttacaggtgtgagccacggtgcctggcctagtgatccttttaattcacaatatgaattattgtgtcctccctgattcctggatgcgctgtgcatatttctgattactagaaagatgtaatataatagcaaatagcatgagcttcagaattggacagtcttgggttcacataccaaagctatgttctttggcaaattaagaatcagttttctcatccataaaatataggtaggaaaagtttctagctactacacttgttgaggattaaaggaggccatcatcttagtttaattttagtacctgctatgtagtaagcagtcaataaatgatatttattattcccaaatcctggcacttcccactcttagcaaacacagaaaactacaggaggtgtctgcctagttaaaactctacctgctaataccaagtagtttgttttacttgcacttaagacctcagtaagctcttctctttttttcttattttattttatttatttatttttttgagacagggtctcgctctgttgcccatgctggagtgcagtggcatgatctcggctcactgcagtctccacctcccgggctcaagcaatcctcccaccttagcctcctgagtagttgggactacaggtatgcaccatcacgccccagctaggttttataatttttgtagagacggggtttcaccatgttgctcaggctggtctcgaactccggagctcaagcaatccacctgccttggcctcccaaagtgctgggattacaggcatgagccactttacctggccctatcttttgtttctttacccagatttttaaactggaagactgaaccatgtcctacattgtcttgtcttcttaaaactgcactgtacacatagcaagagcttaaaaaatgcagggggaaaaataagattttcagtgcatttttacctctacaatcaaatgattgtaggaactcaaatgagttactcagtattactgtaaaacaagggtaacataaaattagtgtaaattggctggacacagtggctcaggcctgtaatcccagcactttgaggggctgaggtgggaggattgctggagctcaggagttcgagatgagcctgggtaacatagtgaggccctgccttcaaaaaaaaaaaaaaattaaaactaatgggccgtggtggcatgcatctgtagtcttagtcaggagactgtggtgggaggattgcttgagcccaggagattaaggctgtagtgagtggtgatcataccactgcactgcaacctacgtgacagagcaagaccctgtctcaaaaacaaaaccaacaaattagcctaatttgcaaatatgtactttcgaggcctgtgcaggtaaagccaaagtccagttcgatttcccctcagtcacaataaataatgagattgttgcccagtaccattagtttggtagcctactcaaacaggagtgtgaatgagttcattgatcatatttggattgcttcacatttttaggcagcttggattaattaggagaaagtcaattgcgccagcaaatggaaatctcggaagaagcaaatccagtgagtagtatgcttagtttctttgcattttgtagccttgcattttcagcactggtaaagcataagaacaacttgatcttttgcagagcagttgtttgactacttaattgtcattgattttgaatcgacatgctggaatgatgggaagcaccaccatagccaggaaataagtaagtctgggctacgaatggccaaagctggcactagatgagtcactttaaagtttatagatctgaatcagccaaaagtttaagaaaacaggatggtctatgcattggtagtttaatgcaaaacttatgttgaataaaaaagagcaaaatctcaaatacctaaatgtgttattatataaaatagttgttttatattacatacaacacctcaatggcatagaaactgaaaaaaatgcctttgcaaaaaaagtaaattttatattccatatggtttttatatttatttaattatattgttttcttttaagacaacatgctcataacttcaatattttgactttagcataactttattataacctttatgtcacactgctttggtcattttagtatgcttttactgaaaactggttgtttaattaaaatggtaacatgtttaatttaggatgattacaggattaatttaaaaattatttattcaactgtcaattgattattctttcatttagttgagtttccagcagtgttgctgaacacatcaactggacagattgactctgagttccaggcttatgttcaacctcaggaacatccaattctttcagaattttgcatggaattgacaggcataaagcaggtatgatgcaaatcttaaaattcagaagtcagtttcaaaaagaaaataaaagttattataccatttgaaattagatttatttagtgttaggcatgatggcttatgcctgtaatcccagcactttgcaggctgatgttcgagaattgcttgaggccaggagtttgagaccaacctagacaacatagtgagaaccccatctctaaaaaaaaaaaaaaaaaaaatttaaattagcctgacttggtggcatgtgtctgtagtcccagcttcttgggaggctgaggctgaggtgggaggaccacttgagcccaggagtttgaggctgcagggaggtataatctcagtctatcctgggtgacagactttgtctctgaaaataaatgaataaataagtaaataaataaataagattagtgttattccagattcaggactcgatttatgtatttatttatttatttttcagacaaaggcatgctctgttggccaggctggagtaaggtggcggggctcactgcaacctctgcttcctgggttcaggcgattctcatgcctcagcttcctgagtaactgggactataggtacacaccaccacatctggctaatttttatatttttaatagagacagggtttcactatgttggccaggctggtctcgaactcctgacctcaagtgatctgcccaccttggcctcccgaggtgctgggattacaggcgtgagtcacctcaggactcgatttaaaaagcaaaggaacatacctgtaatctcagtactttgggaggccaaggtgggtggatcatctgaggtcaggagttcgagaccagcctggccaacttggcaaaaccccgtctctactaaaaatacaaaaattagccaggcatggtgttacacacctgtgattcccactacttgggaggctgaggcaggagactcacttgaacccaggaggtggaggttgcagtgagctgagatcatgccactgcactccaccctgggcaacaaagcaagacctcgtctcaaaaaaaaataaattttaaaaattaaataaatacacagcaaaggaagaataatgttataaaaatgaggatcaaattgattttatggaaattaagtgactcaaatttgtctatgatttatgtcagtctggacttaatgatcatatttctgtgtgattttagtttttatcaacctaatctttcttaccttggtgggttctaaatattctttctttcccacgtgtttttacctctttccactaaataaactctttgccagttagaaccactttgttatgtcttcccacagtacactgtgttttcatgacttggcatttctgattcttttaaaaccattaatctttctccacagttataaaacatgctaaataataatggaatttgattgttgaattcagcttttgtgactctctactcaggctcaagttgatgaaggagtccctctgaagatttgcttatctcagttctgtaaatggattcataagattcagcaacagaagaacattatttttgctactgggatttcagagccttctgcttctgaagtaaaattatgtgcatttgttacttggtcaggtaaagaataagttatacctattaatcacagatgggtagcattaccactatgtaattctttatttctagttttatacttgctaacctagaattatgtttgttaatcttctgggctaggaaaaaaaatttaaatgcctagcagatgttagccaagaaaagtaaattaatacatattttttaaattaaccttttgggataccttaaaatattaagcctgaacttaaaaaaatgtttctagagttccactgttaagaattaagcaaagatgatttagtgaacactcttatgctattttctacagtcttcatcagctcaacatcctttgcttttatgctttgacacttaaaagaaaaaaaaaatgagccatttaaagtaggttttttgtatgactgtgttagagcattgctgttaatagtcattaatagcaatactgtgtcattgataagatagcattgatagtcatatttggtttccagttactataaaatgtttggtttctcaataacattaatattttcctagaatatagaaaatatagtccttgtaatttaacatgttactcttctttctgaaataaggttttactgggtgtttaagaaatcattttgaaatttagtcatcaacctaacttgttaatagtaagttatataaagtgaataatttttagatattagcagagcaatgaaatcatactgttctattttatatgatcttctagcattctatttgtaaatggtggcagcataagtaaaaaatgctggcatcattgactttgttctattttaatgtacctaatgcagactgggacttgggggtttgcctggagtatgagtgtaaaagaaarcagctgttaaaacctgtgtttttaaattcttggattgatctcagagcaacttacaaggtaatggtaaaaaatgggggcatgtttacttttttctatggaaaaatgattaacttttatcctacacatgggcatgggtttctgcaaagaagatactttcttttgtactggtcacataaatgcatttcttaaagtatttaaaaacaacacacaaaaaataagcacattctaaatctaatagaactaaaaattatgaaaagtgtttaatacatagtctttaaaatagtaatcttctyttaaatatatctttttttattggttagcttttctataggagaaaaccaaaaggactaagtggtgccttgcaggaagtaggaatagaattctcaggacgagaacattctggttagtatacattaaaaattatgtaagccayttgacttttaaaaaatacttcatatgaatttcattttttggtaatgtcattagtaagggatatcttcagcctaaaaaaaaaaaactcctaatctaaacaattcacattgtttctaagactttcaaattaccactttcataaactattgtaagatamactgccatctagtggctttctagttgctaagaagaatgaaaagaatgagccaaatcaaatggagattaaacaagtgctcaaataatagaatggactagtgaaaaaactgaacaagactattagattattcacaaatcctggttcctgcagaacgctggccacattttggggaactgtctaatacattttcatatcctcctctataaatgtggacgagcttgtctttcactggtaatgctgccatagccttccacttccaagaccagtttatcatgattaaaattagtagatggtcataaaactaaaactgtgttccaatttctacacaagtggtgtttttctttttaagttatttctttagyactaaggaaatagtactagtaccactaaattcagtgtttgatatctgtatcctcagggttggacgattctcggaatactgcccttcttgcttggaaaatgatcagagatggttgtgtaatgaaaattacaaggtcgttgaacaaggttagtagtgtcttgcctttttattctgtcatctcaaacttcataaacagtcatacgttctttgaaacgtagatttaatgtgtgcagtcatttataaatcaatgacatttctcttttttgtcataaaactgtatactgaagaaattaacgaatgcacagtttctaaagctgttgcatttgtctgtggaatcataggttcccactaagaagaatttcagcattctggccagaaatttgaatacaattcaagttgaagaaatgtctgcctgtaacattagcatccagggtcccagcatatataataaggagcctaaaaatrtaataaatcctcatgaaaaagttcaaatgaagtcaatttgtgcaaattctcctataaaggcacaacaggatcaattacaagtaaaaaacaatataaaagcaagtcttcacaatgtcaaaagttccttacctctttttaatactaagtcctctacttctgtggggcagttgcagtctcctaccttgaattcayctatctrtatgcaaaagcaaggaaaaaatgaacatcttgcatttaataccaaatctaaggcttcaacagttggttcagaattggtacttgtttctaccaccgttccaactgttcatcatgtttctgatttggaaatgagctctactctggactgtttacctgtgttggctgattgggaggatgtggttttactgccagcatctcagcctgaggaaaacgtagactgtacagttcccattagtgactcagacttagagatttcatttaattctggagaaagattaatggttttgaaagaattggaaatgtcaagtcatgaaaactttggagacatagaggaaactcctcaaaaatctgagacttctaagtctattgtgtacaagagtcctcacactactatttataatgtaaaagaagccaaagatccaggttcagatatttctgcctttaagttacctgaacacaaatcaagtaccttcaacagagttaatgccaatatgtctcatcctttagttttggggaaacatcctcttctttcaggtggtaccaaaaggaatccatgcagtccccaagctttcccacyagcaaaaaaacaacccttcactattcatgaagaaaagcctacatcatctgattgctccccagtaagaagttcttcctggaggcgtctcccatctatattaacttctacagttaacctacaagagccatggaagagtgggaaaatgacacctccattatgcaagtgtggtcggagatctaagagacttgttgtttctaataatggacckaaccatggaaaagtcttctattgttgccctatcgggaaatacmaagaaaacagaaaatgttgtggttatttcaaatgggaacaaacacttcaaaaggaargagccaacagcatggttccatctcattccacagggggactcacttttagttctccagaaacaagccatatttgtgacagaaatttaagtatttccaccaaaaattctttgagactcaggccttcaatgaggaattgataacctttcatgtatgaatcctaattgttccttgaatttccaaacatgagtattctgataacatcttacactattttatttttattttatatattaatgtttactgcatttaccatactttcttcaggaaccacaagtgtaatcttttgtaaacagtatttattagattacatataataagcaacaatagtatatgatccttcttttatagttagaccttgaaacaagtctaaactatttttaaattatttgcaaaaaatgtgactaataaaaatccctagtctattttcaggtagattcttgtactttgagattatcataatcttctaactgatattttatatttttctaaaaacttttataagttctttagttttatttcaggcttgaacattggttctgatttgtatatcaacatatcagaagaattagtcaactaaagtttgaaaacctatgtagcagagatctggttcagaaactgcttctatactatacatttaaaaattaatcagcaattgatggtattatttttatattaagaaatgataggaacattgacactaatgtggaggaatttgccaaatattttatttcaaaatttagcctctgatatcataaccacaagatattttaaatcaacagtttctaagcatactaccacagtttttatgacctctccatcatcttgtggtttctagagattgacagatactatgtttgttttatagatatggtaattaatgaaacaactttaaattgtcttccattctttcttcctcagttcatttctttttgtcttcccwctgatagtctttggcagctcttgaataaattctacctgttggcatcaaggggaagaaaattagcctggaaatttttatctttacataaagccaattatatagcagtttgattatgaattctaggtggaagaattagaatagtctttggaatgggttttgggtaacagccaaaatagggaaaagggtattgttaggaaagttgtcttgatattaagtatttacygtgagtccagtaagccaaaggaccaaacaaaataggttcagggtttcattttaatctcaaagattctgattcttacccatatgtcatcagttcagtttgggacatgtggtgcagcatgtgtgaagaaaatattcattaaaatgtaaaaataaacacttgaaattgtccacaacactgagcaaatattcgttataattaggatgcctacctttctgggatatttgtaaggtgctgtagtttttttaacatgctcctgaatctcctttattagttgttcttgatcatgtgacttgtaatcaggatttagaacgacaaaagcctttactacctaaaataaatatttgaaacaccaggaaaatgagttatgcatttgtatgttttagtatgtcttgtttgcttgctctgagaatctacatgcctggtggggtgggccagtgtgttttaataaagtttgatcccagctctgtgctcttaagccagccacttcctggtctgtacctaatacaggagagcttctgggacccctgtaacaacccagcctcatccagcctagccctcagcatgggggattacttataaacagtagtcacgctgagtttgccatgtctttgttgaagggaacagttcacagagaacatgcagtctttatacaaggctgtgaagattccagcagctatttttttgttgctctgatccatttccatggccctgaggaacaagagtggaaatcatggtggcctttaactggcagaagccaagaaagatgttattactttatgcttacaaatcctcttctccaaattttatccttcctagaaatgtttttgaaaactctgcctagtttttggacctgtaatggagaagacagaaagataggccatccctcatagccccctttaaaagtaaatttggagtcctgtcattttctctcctagggcactaccaggactgccatttactgccttccctagaggcatgagtctaggtgcatcaactagtatgtacctccaacgccagattaccagcccggagctggctatggaatgatgcttccctgtaggcacagttccaggagagtcccctgaagcttttttatgattaagtatcctgcacttaggtgcctgaaatcttattaaattcaaggattcgtttgtccagcttaaagataagctggcaacatttcctatccactttgatctgggagtaaagatttcattgaaaaggaattatttgaaacaacaaattaccaggacagccatttggtgagaaacaaagacttgaagttataattttttcacatattgaaaactgttcaccagtgggcagttttacattgtatgaacaattacccatttttgtctttacccaaaacccttgtggccaggcacagtgggtcacgcctgtactgccaacatttgggaggccgaggtgggaggattgcttgagcccaggagttcgagagcagactgggcaacatagtgagactttgtctctaagaaaaaaaacaacaacaacacttgaacatttttaatttacatgtgccatgcggcagttgtgaacccttgtgtgtgtgtgtgtctatggatataattttgttccattcactttttgacattttataaaatgcatttgtagttatgctagctctgctgcattaacatttttacaaattaaaaaattatgcttgttgtaagtgagtcattcaaaggtaaattattttaaaaactgcaatactggttcacatattgacgatttctacaacttggatagtctcttttatctttttaaactactgcagaaaatgttaaattaacaaggaacaacctaacatgggtaagagtatgaactctgaagtcagaacagctgggttcaagtcacagtttgttgtgtaatgttggacaagttaggtaatctctttgtgcctcagtttccttctctgtaaaagagattatgatgattaaatgaattagcatagatgtataatgcctggcacatagtaagtcatcaaaaacattagctcttagttgtagtcttagaattacaagaagtttgggtcttattttttaacccagaatccataagtgggcttcaaatctctatgaaattctatgcaaaatcttgtatttttctgagaaaagtctatggctgtgccattcaatatgatagctgctagccacgtgtgtctatttcaatttaaatcaattaaaattaaataagattaaatactctcagtcacactagccacatttcaagtgattgatagccatgcatggctatcgcattggatggtgcaaatatagaacatttccatcactgcataagtcttaacagtggcctatggttttcttcacattctcaaagagatatgtgatcccaaaaatttaagaacctagtgatctagacacatattccacaagtctttcacattccaatgttaaaatggtatttcaaatccaaatattctttttaatcaattctggaacttgctacccaattaccctgcctggcaggacccagcctagagaaggacctaacccaggtagaataggcctggcagcagaaagggaggcatggagcacatggccgttttgttcatggatacctcgtttgagatacccactcacatcttctactaggaaatgctgcagcctaccactgttggaaaactggccacactttccccctcactctgactaatccaagccctatgccaagcccccggagctgtgaggggaccacaacccacttatagacctttcctatattgtacgctaggatatcaggtggctgccaagctaaccctgttccgaaaggctcagctaccatcctgtccctagtaagcacctgtctaggtgggtaaaactgatgatgactaatggtaggggagaagtacaggaagagctaagactcgtgaaaccttgccgatgatgttcagagcaaagagacaagccaataatcactgactgttttccctgccctcagctgcctggaatataccctttcacagtaaatagcgattgtcatcctagcaacttgacaaactaccaattcccagccactgggctatatctggaacaactttgggccatccaggaggacttaacagggtatcttctggcatcaaagatcagttaggggaatcagtcctggggggagatccaccctccactgtaacatgcacatctcctatttttaccttaaacttttttatttttatttttatttttttgaggcggagtcttgttctgttagccaggctggagcacagtggcacgatcttggctcactgtaacctccccgtcccgggtccaagtgattcttctgcctcagattcccaagtagcagggattacaggcgtgtgccaccatgcctggctaatttttgtatttttagtggagacagggtttcaccatgttgaccaggcttgtctcaaactcctgacctcaggtgatccacccacctcagcctcccaaagtgctaggattacaggtgtgagccactgtgcctggcctgccttaaacttcaggacctatttcrtcccctgagattggataccttctaactctgccctgtgccctgtgcttgaagccctatacctaggatttgagataaggagcttgaatacatggtacagaaagttctggatttgtattgacatcagtgtcatcttcaaaacttggattcagtgttagaagggatatggcttgaagaaatacttgtgagaacttgtaactcagctagagaaaccctaggggcatgttgtagacacacaggcaaaacgcaggaggctgcctggcatggtacttttaagccaaaatactgtgtggtcagccccaataggaatgggctttcaggacacctgtgttattcagagtttatttcctgaaatctctacttatttacctaccaagactgcttatggttacctcagttccagcctctggttcccacttctgacatctgatgccagcccattctccttcactacaccagggacctcgttggtttccagaccttctgggtaacaatttgatcccatccagctgacttctgtcaccccatcctgacgtgagcctgggttactggcattcacaccatctttgccctagtccaccacggaaggaattcaaattctttctagtacgtattttcagccttattttgtttgtctgttaggatcagagctgcaactcataattcaatcttattttgtagcagttctttctgactagcatatttctatctgacttgcatatttagtaaatgaatcatttggttaattctgtttcactgagctactgtttgtaagtatgtgttaaattgccaacaaattataaagttgacatgaatcagttcttttacctctcctctgatggggtctgggctgctgacaacagctgactctgcaactgaagggtgttcattcagggcattttctacctcaaatggtccaattcgatagctagaaacacatatggcaggaatacatacaggtgagtggcaggttcactctagaacactgatgatcagttaacacagacatatgcacatatggaaaagaaagttacccagaggataatatnacatcatctgctcttgcaacaaaccagaaatacccatctttatccatatatsctctgtccccagtgatatagaaattgcctcgtagagttgaagctgtttttgaaggattatcctgcaaaacaaatagcattttgttgttatggtgaatccaactcttctggtcaattggaatttttttttttttttccgagacagtctcactctgttacccaggctggagtgcagtagtacgatcttggcttactgcaacctctgcctcccaggttcaagcgattctcctgcctcagccttccaaatagctgggactatagacgtgcaccaccacacccggctaatttttgtattttttggttgagatggagtttccccatgttggccaggctggtgtcgagctccttacctcaagtgatccgcccaccttggcctcccaaagtgctgagattacaggcataagccaccgctcctggccctcaattggatttttaaatgttcaaggaagcagaaaagtttggctcctttgagaagcattagagttaggaagagatagattgtgaaaataaagatgaaattccagcatggagctagcccgacagaagaaaggtaaactacagttacaaagattagtcatgtttccatcttgagatttttcttagatagattacaaaataaatattgcagtagctcagaggagtaaactaaattaagtcttttgctaattgattaatagataatgctggtaggaaaagagagaagtaaatactcaagagtcaaaagaaagcactgacacctaataaagagcagacaggtttgttttgtttttgtgctttgttttgttttacacaataatagaattggttctgcaagtctgacataagaaaaaacaagatactgttacattatatcaaatacactggcaagtagcatctggatcttttattatatgatagagactttgctctaatttgtatactgtgattagagatgaaaatattgttgtaaacagtaaggagcttagaaagcctcttgtgaaagacatttgcttaatcccaccacccccgcatcccctgtccctctcactcttcccgaaaagaaagagcactaactggatttcaggaaaatgagtgggttttgtttgataattgagaggatcaggggatgttaagaggctgtcctctttctagggtcccttcctcttgccttcgtggacctggaacagtgatctggcctcaggggaccagcatgcttttcttcagcaagaatttgrgtatttcttcaatttcttgtcttttggattactattcaggacaaccaatctctcaagaaagggtcaagtacctatcctaggtatgttttgtggcaaacagggattgttaccaagcacttgagaaataaatagaaaatgagattatttagtaagtcacttactacstaatgagtaaaaaggccaaatggtcggttgggtagaacttgaatgccaatatctccttcttgtccaggaggtagaacattgccatttacatctacaatctaggataaaatagaacaatttatttaaggaaatttttgtttaatgtcgcagcttaaatattaactttgcaagttttattttggcttttgccatttaaaaatgaagacttaaaaaaaattttgtgtgtgtgagacaaggtctcactttgtcacccaggctggagtgcagtggtgcaatcatagctcatagctcactgcagsgtcaaacttctggtctcaaacagtcctcacacctcagcttcccaagtatctggggctacaagcacatgtcattatgctcagctaatgtttatttttattttttgtagggatgagggactcattatgttgcccaggctggttcctggcttccagtgatattccagccttggcctcccaaagtgctgggattataggcatgagccactgcacctggcccaaaaatattttaaatatactttaaattcctaagagaaatatatttacttaaattcttattgcataaaatattaaatacaggttaccaacatgtgaacgcaggataaaattttttaaaaattttaccatccagcaataatcacattttggtaatatcctttgagacaatatagataaatcgaaaaataggattgctggctgggcgcagtggctcatgcctgtaatcctagcactttgggaggccgaggcgggtggatcgcctgaggtcaggagttcaagaccagcctgagcaacatggtgaaaccccatctctactaaaaatagaaaaattagccaggcatggtggtgggcacctgtaatcccagccacttgggaggttgagcaggagaattgcttgaacccgggatggggaggttgcagtgagccgagatcactccagcctgggcaatgagtgaaactccatctcaaaaaaaaaaaaaaaaaaagaaaaatagagttgctttataatatacagttttgccaacctgcttttatcatttagcaataggtcttgattatcttttcctcttgataaataaatatcttcattactggttttcaaactttgtttagctgtggaacctacagaaccttacttcagaagcccaatatgagtaaacaggaaaaggggaatattctctggttgacaatggtaagtaagccacagccttgctctcttaccctctctccaatcctcatcattccctgaagtgtctaccagtagctagcatttattaagtacttaatacatgctaagtaattaatgctaaacctttaagtacttgacatgtacctattcctcactgtagccctatgtggttagaatttttatgcccatttgacacatgaggaaactgaggtgtagagagtttaacactgtgcatgattgagctggaatccaaatctcaccacttacactccagatcatatgcttttaatcattacactcctctgtgcaatgcctctagagagtttaatccaattaaaaaaatcagattagcatttctcaagttgattgctgattttatacatcagattttgctctaaatgacttttagctgtttctaagtatcaaaattctgcttttatatatattctccagataccttcaaacctgaggtgtggcctgcatggagaataagtataatacttatctagcactttccaaaaggaaaggggcttatgtgctgaatgagaaacttaaatggcaaaggaattctaagcgtaaaaacttctctttaagctcttgcaaataaaaaaatataaattcccacccagttatctaaagaaatatgtggttccaggtatgaaggaattattgatggaaaggaagtattttaaaagttccagttacttacagattttaatagatgggaatatagataaaatcttctgtgtctggggagaatcatgttcctcattgttcatagggtcttaaaatgtttaaacatgaaaattatgagtatttaaaagcaaacaaagaagattataaaggttgggctttgaagttgtaggaatctgatattcacctggttggaacacatccccagatgccagaatgttactgcagatgcccttagctaaggaacaaraagccccataataacggcccgtggaaaagagttaaaaatgactggggatgcagrmaaagtactgttttcctctcagcctcatcatatttgcattcaaagatagctgctctagaaaaccactgggctcaaattaatggggagcaggtgggggtaccttgcagttgggatcactgtgaatacagctgtgcctgtaagaccctgatagccatgcatgttgggaattgctattaaggaaggaagaaaaagaacatagctgtgttacatatcaacttccctgtaatgcagacatgagtgtgcttaattatcaatatttctttcttcaacctaaggtagcctgttaaccaacaaactattgttaagcctgtttgggctctcctaccattttttcttagataagcttttcaaagaggaatgtgaaaaaataaaaaaataaataaataaataaaaagaggaatgtgagggagaagtaaataacagtacccatcttttggacctttattatgtactaagcattctgatatgctctttaaacatattgtctcctttaatcaccacaagaaacctatgaaatcagttctgttattatttggtttaccaaccatctgagactgaagtggtgaggggttgtcggggggtggttcttcaggatgtattgccttaagtgctaaaaccagataagtcccaggcaaacagacaggttggtcactctagtcccaactttacaaattaggaaactggaacttacagagctttaacagtgtacccacagacactcagacagtgaatagcagagatatagttgaaccactaggctatcctatcttgagaccaggtttccacagcaaggttaaagtgagagaaaggacccaggatctggtttattctataaagagttacagcagcaatcaagctcatctaaactctctcaaacttayttgatcctaaaaactacttggggggtgcttgttaaaatcacaagatttcaaatttcagagttccactccaaatctattgaattggtctctccaggggcctgagaattagtatttttaacagatatccatatgatgtttatgatcaaacaagcttgggaaacatttatctaagagctgtactctgttaattcatccatatttttgctgcttttgctgtctcttaacgtacagatgggtctctgaattaaaatggttcgaacttactatttcccaactttacaatgggtgaaaaagataaccattcagttgaaaccatctttctctctagatgctgggcagcaacagtaagtcacagctcccagtcagccatgcatttgtgacttaggatgttttcaacttatgatgacttattattttgggacataaccctatcataagttgaggagtgtccaaattagtgttaagttcctttggctacayccagctttgaagctcggttgatctgagaacaattttaaccctatataaagcttgctgatggggaactggaattccccctaggcatcaggtggtagtagtggcagtggatacagagaggctggaaatggccaggcaggcttgggagcagagagggaaagtgctgcagccactgtaaactgaagcctcttcgggcctagttgaccygctcagaaggtcttgacctcccttgcctgmgaggaccagtgttgtgttgtggttaagagtgcagatattggagccagactgcttgggattgaatcccaactctagcagctattagctgtgtgacttctggtgagttcttttacctctttgtgccttgtttgtaaaatggttctaatattagtatgcttctcatagggtttcttctggaaattcaatgggttaatatttatttatttagagacagggtcttgctctgtggcccaggttagagtgcagtggtgtgatcatggctcactgcagccccaagctcccaggctcaagcaatcctcccatctcagccttctgagtagctgggaccacaggcacgtaccaccatgcctggctagttttttatatttttttgtagagacaaagtctcacgttgttgcccaggctggtcttgaactcctgggctcaagtgatgctcccgccttggcctcccaaagtgttgggattacaggcgtgagccactgcatccagcctaatgggttaacgtttattaaatgcttagaactgtatggtacaatatgggtatttgcaaaataatggagaccaagaagctaacatttctaatcattttcacatatttataaaaattaaagtatcatggaagtaaaatggaatcaccatcataacaaagaaagtttatatgggggtaagcggtaggtaggtagtgtacagattgggttgttaaacattctcctggaaggggatgtgcaaaccttaacatcraaagcaggagaaggttttcccattgagccaggtttaattttcattcccttaaaatttccacagattagcacctagttaagaagaagaaaaagtaagataacattacaagtcacttaaaatttattcatctatcatgcattcattcaacaaattatttattgaaaacttactatgaactaggctcaaaatgaatgctatactctcatggaatgtagtgataacatataaatacatgcatatgtataaaatatagttataacaataattactcatatatccrtatttatcaaaacatgagtatattaacatttgcatttatattagcatacttgttatgctatttctagttaatgaatttttcaatttttgatttttatttttgatattttcattttttaccaggtgatacattctcatggttcataaattgaagcattataaagacacattgtgaaaagttttttcaacttttcccttatctatttcatcttactcctccctcttctacaaaataaccactgttgttcttttttcttatttcattttttgttcttatttcattttttgttcttatttcattcatttcctctagaatttcttattccttatctctatgagctctttaaaaaatcctttttagagtatggttgctaaggagttgtccagcaaactcttaatatttcaggcagcaaggatctcagcattttccattttgaggcagccctaaataagatacttccctatcacactgggaggaattctttctttcagtagatccagtattatttcatttaaaaaaatattgtaatgcccttactctgatccattaacagtggtgtttgtcaatgaatggctatttaaacaactatctgttaacagagcttttttgcaattaggttcttgcaagcattgtttttttaaacattttctaaccactcaactcctatccctcaaataatcatraggagactgtggacactttggtttttattcatctgactaaatggaatccagctatgtcttttcagtgaggtcaggtaccgtttcagtctgtccatatccttcgtagatatccaggcccgtsttgtttctccatttttcagtcacgtcaggggtaattggttccccagcactcacacagtgctttaagcttttaaacttatagcttctcagaaaaccagataagttagatttaggaggaaaaatggagagaagtgaagattaaggattatttcttatgaacttcaatataaaatgttttagtcgctttttaattcctctccctagcacaaaacaaaccattttaccccataaacatatacaactactaagtacctacacaaattaaaaataaagatattaaaaagataaatcattctaatatcatagaatgatactagaataccccaaatactagtttttctttacccccctttttgtggtggaggtataatttattacaaagaaggtcattctgttcttagggaaggtaccccataataacattttattttattttgtttttatttttatgttttcatggaatgcttcaaaaatttgcatgtcatccttgtgcaggggccatgctaatctgctctgtatcattccaattttagtgtatgtactgctgaagtgagcaccataataacactttaaatcagcaatgaaaagtaccaattgtttggtaaaactgatggtgggatatttatacaatggaatactatacagctatgaaaaatgaggaagctcttggacagtgctgcccagtagaactttctgttatatggaagtactctgtaatctgctgtacccactacagtatatgctagccctatatggatattgaacactagaaacaggactagtataactgaggaattgaatttttaattttacttaatatttatattgaaataactagctgtggttagtggctaccatattgcacaacacagtgccagaatgtattgttagaggaaaaaagcaaggtgcagaactgtgtgaatcttgtgataccatttatgtttataatagagaaggaaaggccaggtgtggtggcttacacctgtaatcccagcactttgggagttagaggtgggcggatcacctgacatcaggagttcgagacctgcctggccaacgtggcagaaccccatctccactaaaaatacaaaaagtagccaggcatggtggtgcacacctgtaatcctacatgctcaggaggctgaggcaggagaattgcttgaacaggaggcggaggttgcagtgagccgagattgtgccactgcactccagcctgggcaacagagcaagactccgtctcaaaaaaaaaaaaaattgagacggggagaacacatgtgtatcagtttgtgtattttcagggagaatagacaagaaactggaaactcagtttgcctccatggaagaggactgggtcactggggacaaggtttgaagcaagacttttcactatgtatttttatataccytttgaattttatggcaggtgaattatttcctattcgataattaaataacatcagtttaaatatatttacctgtgatatgagctataacaagaaatacatagatgttgagtatccttaatctgaaaattcaaaatccaaagtgctccaaaatctgaaacttttttagtaccaacatgatgctcaaaggaaatgctcattggaggatttcaggtttcatgtttttggattagggcagcccaaccagtataatgcaaatattccaaaatccaaaacaatctgaaatccaaaagacttctggtctcaagcattttggataagggatactcaacctgtactgagtcttcatcctgggttcctggcccagagcttctaaaacctttgtaatttcccaagtgatgggtgtgctaggagtatcttttgttctaatattttgcctttgactctagtttctgatacagagcttctaaattccatggaatttccwgggtaatagaattgtcttttgttctcatgaggcgactctcaatggggctcccgtataggggttggtcacaagaaagactaagccaggaacagaagcttggcactttcagcctcacctccatccttcagggaaaggagaggagctggagattgacttaataatcaatcatgcctacataatggagcctccaaaaaaatccctgaagtatgaggtttggagagcaccacgtgccggaaaggtagtgcacccccactccacagggatagaagctgctgcacttgggaccttgtggacctcaccctatgtacctcttcatctggctagctattcatctgtaacttttatcatatcttttataataagctgggaaatgtaagtaagtgttttcttgcactctgtgagccatcatagcaaattactaaacccaaggaagggtcatgggaacctctgatttgtagccatttggtcatatgcgcaggtgacagcctggacttgtgattagcatttgagatgggaaagagtcttgtgggactgagtcattaacctgtgggatatgatgctgcctccacggagataatgtcagactgaattaaatcataggatactcaactgatgttggagaattggtcaatgtgggggaaaagatcccttacatctggagacccagagtattgagtgttgtgaatatagtaaaatagtggttgctgggagttgagttatgaggatgcaatagcgtaagaatgatataatggactttggggactctggggaaagggtgggaggtgggtgagggataaaagactatacattgagtacagtgtatactgcttgggtgatgggagcaccaaaatctcagaagtcaccactaaagaacttattcatgtaaccaaacaccacctgtttcccaaaaccctattgaaacaaaacaaaacaaaacaaaaacaaaaacaaaacaaagagaaacgggggttgtttttctttttggattaccaatgaaccctttcaaatggaatcagcaatagaataaaagatatgcatcctcttttctatctgctgggataaggttccaaatagaaacaagttctctactttctcagctcagagaaagccatcatccaaaagatttaccatcttcttacccataaccactgggcttagagctataaacatagctgaaccctcactttcttcttgtttgggggatcttgccctggtcacagtaattatcatttacagaatgcaggcaagaaggagaaagaggaagaggagagattgctaaatcctgtgtctactggcttggagctatgtttcaggcagaaagatcttttattttatagcttcctcttctcccctctccccactagatgccwatttactaacatttcttacctggttatatcattctgtacaagcattcggtatacagttggtgctgaacagaagactgtgatggggtacttggagagtgtctgcaatttagaaaaagcaaactcttggtcttactacaacttaaataagtgcttaaatgtctttggttgacgcagcacaatttaaacattgtttatgttaatgtaaatacattctkaccttttcttgtagaatcatccctcagtgtctgcaggattggttccaggaatgcttaagtcccttatataaaattgtatggtatttgcatataacctatgcatatcctcccgtatactttaaatcatctctagattatttatactgcctaaaacaatgtaaatgctatgtatatatttgttacatggtattttttatttgcatttttttaattgttgtattttgtttttggtttttctccccaaatattttcaatatgtgcctggcagaatcagaggctgcagaacctgtggatacagagggggccgagtgtatcttttcaggcttattgactttctggatgtgacatatcttaaatcatattgtctactctgatctctgcaagttgctttattcaccagttctgtcagccatactgcttaatgcatttctaaatattgacctctttgtgctttggcttacttgcaagatagaagtcggctcaaaacggggtaaatggtgtgtgaatacacatgctccctggatcyacggagaaaaaacactactccatgcagactttgcccagcccgtatctgaggtattccacatcacatctgagggtgtcaaatctagccagaacctgggaaaacaaagagtagccctgatgtacataggaaaataaatataaaagaccagtacataagtcatcatctttgcagttttgacacttcaagctgcacttttgtgnaagtataccttccatttacagataatcctaaaccaaaactgctgtgggtgtgtgcagtcattttcggatatccacttgttccactggtaaagaatatggccatgatctcattgtgttttgtcttcacacaggtgtggctgtcactggcatgtctgcaaaggaaaaactacaatgactgcatgttaaacacagcatcacagactgttaccactgaaaaattttgagaagctctccacttgaacctcttcatgtcatgaatcaggtgccagtggcttagcttgaattacagggtaaaagccatcactttctctatccttttaggtgctttctagaatcaaaactaaactttgtcatcaaaggcccatttataatagctgctttcctagctttttattctatgataaagaaggattgaagcatttttaaaacttgagatttttatcatacctccagcagagtaaggagtctgtgtgatcttgcaatcatggataaggaagaattttccccttccctcccctatggatgctttaaaatgtgattttttaaaaatgagtatgttaatacaatacatgttagtaaaagccatgggtactgatgggccaacacactacagcctactggcaaaatctgacttgcctcttgtttctgtaaataaaatgttattgcccattcattgaggtagtacctgtggttgctttcacactacagtggcagagttgagtagttgtgatgagactgactatacggcctgcaagccttaagtatttattctctgtcccttttacagaaaatgtttgctgaggctgggcatggtggctcacgcctgtaatcccagcactttgggaagctgaagcgggtgaatcacctgaggtcaggagttcgagaccagcctggccaacatggcgaaactctgtctctactgaaaatacaaaaattagccaggcacagtggcacatacctgtaatcccagctactcaggaggctgagaatcgcttgaaccagggaggtggaggttgcagtgagccaagatcgagccaccgtactccagcctgggtgacagagaaagactctgtctcaaaaaaaaaaaaaaaaaagtttgctgaccgtgaaaggttggcttttctgtttcccacaagagagtctacatagttctggatatagcagacaataagattgaacaggatctaagcatccatccagggaagaaagagttccagttaaagagaaagaaaaccttttagttccaaaggataatcagacttctatacaagtcacacattagggcagctgcacacatacatatcaagtgtctaagatgcacacagacttatccaggcatgtggggttgagaatgagtagaaacaaccaggccattcatgagaaatatagaaaagctattttcttttctttcttttcttttcttttctttttttttttttgagacagggtttctctctctctcacccaggctggagtgcagtggctcagtcatggctcattgcagccatgacctcctgggttcaagcgatcttcctacctcagcctcccgagtaggctgggactacaggtatgcatcaccatgcctggctaattatttttatttatatagagaagaggtttcactgtgtttcccaagctggtcttgaactcctggactcaaaccatcatcccacctcagcctcctaaagtgatgatttataggcatcagccactgcgcctggctaaaaagctgttttcaaaatctgacaaagctacaccaagtgttcagtctatgatttcataattatcttaattaattaaaaatactatctataggccgggcgcagtggctcacgcctgtaatcccagcactttgggaggctgagacgggcagatcatgaagtcaggagattgagaccatcctggctaacatgacgaaaccccatatctgctaaaaatacaaaaagattaggtgggcatagtggcatgtgcctgtaatcccaactacttggaaggctgaggcaggagaatcgcttgaactcgggaggtggaggttgcagtgagccgagattgcgccactacactccagcctgggtgacagagtgagactccgtctaaaaaaaaaaaagtatctatagctgtgttcctatcacttccatcaccaatacggttgccctcaaaacctgaggaagggttgttgtactgatctcttactagaggcagtacatacagaagtgaggagtgtaggctcagcacccatactgcctgggtttgaaacttagctctgccagatactagcatttgaccttattcagctgtgtaattatagtacctaggttgctgtgaggtttaaatgaggtaatatatctgaagtccttagaatagtttctggcacataaccgtatcaatataagctatgattgcaattataacattatttttattagaaccgtacttggcctttggcaagaactcaatattaggaattttaaatgtggtaggaaaagtccatagttgcaagcatgctcccaaatccttgagtaaaggtaggaagctcattctagagaaggactttgctgccagcccaattctaaggcataaccagtacctggcaagagttccaagtaacccatggaaacaccccatgctaggcttcaacatcagtgaaattcacttttataattgcatccattaacattaagcattttttcttttaacctgataccagtgttgctgtcagcaagggaatgggatagccaacactgaaggactgactgtgatccttcagtgacaggtgctgggagcactctctagagattgccttgactgaagacagtggctttgttaaaggtcttgactcctagggacaaccccatccaattactgatcaatgtgggtatataaaggccaggacctcttgctttagctgggaacagctttgaggaggtccttcagaggtcccagtgggttgactgaaagctttgtagggaatacatcgcaaataaatttctttctctgcccagtccgacattcttactcattcctcacaggtgttaatcccaaaagaactccttaataaacttcctatacaccaatctccaatctcaggggatcccaacctacaaaaagcactccaagctccttcctacttcagagtttagcactattagtgcagcaataactaccaactgttccctttgcctgttgttttaatttgcatttttctaatcactgctgggtttaatatctttttattgttgcctttccttttgggaagctgttttacaacaagtgtggctactcacttcatcaactccttgaggttcccccacccctctctggagttctctgatacratcagcttggagtgcagattttcacatttggatgcaacagcgtctactgctggggctaaaacatcattggtgataatgcagtttgcttttgaagattgtagtctgtagagaatgtctttctgggtcagctgagtggttcctggaattaaaactgtccctaaaggggcagaaaagaaacagtgtttagaagaaatgttattcttcattatgttagagtagtgtagataccatctatacattctgtatttctcagagtgagttaktcagtttaccaggaagatatctatttatcttgctttcacttatctgcttttgcctttcaagggatttcagagtctatgacccttttggcttaacatgaaagcatgttaaatactggataattattctttatttgaagaccatccctaacattgagcttgaagaaggttttgattgaaaagtaatattaaccaatatttattgagtatttgattatatgttttaacttattcagtccccaccaaaaaaaccccaaaacataaaagctatgaataacttgcccaaggtatcacttaagtagtaagtgacagtgcagggattgaaccctgtagcctgactccagaactgtacacttcaccacatcagctgagtgcctcttaaaatgtacatgattgctttatgatttctttccaaaaggaagtgtggaggcattcatcttttctgtggttctattcctgctggttatatattacactgtaagatgaagtataatgattaagagtgtcctggagccagacactcttatagctgggacttgggacaagccacttcacctctgtgagcttcaggttctgcatctgtaaagtgatattgtaataatactacttcttttataggataattaggggattaaatgagttaaaatatgtaaagaacttagaacagtgctcagtaagctttgggtattattttctcaaaggataaatggactctcaaaaatatatagatcttcctcctgggccccaccacccttaagtcccagacccttaagacagggatggaaagcattcacttcacaataggttttactcttcccaggcgacacagtaggcaagaagattggggaacacatgtctggcattcctggactcttgacactggctcatcctttcactttgggaaggaccaggcctctccatcagggttcttcaagaaaccaacaaccaggaccagaacacaggttctttagaatatcttttctttctaatcagggcaacacaacaatttttgtgaggctgtaactctaagattatcttttaaagatgttccacctagggataaggaattagcctaccacggcctaacttttatataatttaaaggcactctttgacaataagcccacaacaaaataaatgtatcatgattacttaggtgttctggaaaatctcccctccagcttagtaataaatatgatcggaaagcaaacattactaacctgttcgcagacaggccacatttgcaagccaccactctgggaccctgggcagaatcagaattacccgatctcctctttgtagggaacaggcttctgaaagtatattggcaaattttctggacagagatcccrgttcctcaaaactccatcgcatctcttctccatttctgttgatccaccagaaggctggatttgaaggtttctttccagcctgaggaaagaaaaaccagtcattgatttaaaggttgttatacagctaaattctgggccaactgactcaatggaatagattagctgaagaaagttcgcaagtcattagttagaacatggatggagaatttggaaataactctgggggagacatcatcaagatggatgactagagatgcccagtactcacctcctaccagaagtaccaagacagtaagcagataacatgacaaatagagtgtcaaagggagaacactggaatttagcaaggaagtgacaaaactctctgagacctgaaaactagagatgaaagcatagagagggaagaagagcagctggccaggatcagcacagagcccagagggactccctattttgaggaaaatgtaagtggaagatcctcagcagtacacattcccatcacagatgcctgaagtcccacctacaggagagcccctcagccctcacatgccctgagcctagtaaacgctgtatagtatagtatactagtatagtataacattgttccagagaggaagttcatactaggtcctcctgcaacaaaccccaggacccgagctgctatagcatggcatcattttaggaacagagctactaccatactacatcttgccctggggccaattgcccctgcatctccacatccctggggccttgctgacatccccacacgttcccgtagagggctgcagcattccaacaccaggtggatccagtgatagarccaggccactggcacccgagcctacacacagcactctacaccccaggtaacagggagtccagcacatcaagagaggctgccccaggacataaggcactaaagcacactccccagagcctgagagctgccttcctgagcctgctgccatgaacatgatcttgccccctctagtggcagagccgctttgtgcctgcattgccatctgcggacccaaggactggcccattcaggctgccactactacaagtacccatgtgcactgccaaaggacctgaggtctgactcacttgaggcttaccactgctactgccagtgcccatgcacacttcctgggagcctgaggatcagcctgcctgggacccactggagccactgctggcacccttatgatgaacaaaataacacctatcaataacaatcttgaatgtaaacagtttaaattccccagttaaaagatatggactgtatggactgactaaatggataaaaaacaagacccaactataggctgcctacaagaaactcacttcacctgtaaagatacacatagatagggccaggcgcagtggctcatgcctgtaatcccagcactttgggaggccaaggcgggcggatcacgaagtcaagaaatcgagaccatcctggccaacatggggaaaccccgtctctataaaaaatacaaacattagctgggcatgatagcgtgcaccttgtagtcccagctacttgggaggctgaggcaggagaatcgcttgaacccgggaggcggaggttgcagtgagctgagatcgtgccactgcactccagcctggtgacagagtgagacgctgtctcaaaaaaaaaaaaaaaaaaaaagacacagaaaatgaagagatggaaaataatatttcaaacaaataga

SEQ ID NO: 95756 - DNA, 55184 bp, Homo sapiens
  misc_feature (1)...(55184): n = A,T,C or G
tttacaaatagaatgctagaagatcatataaaatagaacagtatgatttcattgctctgctaatatctaaaaattattcactttatataacttactattaacaagttaggttgatgactaaatttcaaaatgatttcttaaacacccagtaaaaccttatttcagaaagaagagtaacatgttaaattacaaggactatattttctatattctaggaaaatattaatgttattgagaaaccaaacattttatagtaactggaaaccaaatatgactatcaatgctatcttatcaatgacacagtattgctattaatgactattaacagcaatgctctaacacagtcatacaaaaaacctactttaaatggctcattttttttttcttttaagtgtcaaagcataaaagcaaaggatgttgagctgatgaagactgtagaaaatagcataagagtgttcactaaatcatctttgcttaattcttaacagtggaactctagaaacatttttttaagttcaggcttaatattttaaggtatcccaaaaggttaatttaaaaaatatgtattaatttacttttcttggctaacatctgctaggcatttaaattttttttcctagcccagaagattaacaaacataattctaggttagcaagtataaaactagaaataaagaattacatagtggtaatgctacccatctgtgattaataggtataacttattctttacctgaccaagtaacaaatgcacataattttacttcagaagcagaaggctctgaaatcccagtagcaaaaataatgttcttctgttgctgaatcttatgaatccatttacagaactgagataagcaaatcttcagagggactccttcatcaacttgagcctgagtagagagtcacaaaagctgaattcaacaatcaaattccattattatttagcatgttttataactgtggagaaagattaatggttttaaaagaatcagaaatgccaagtcatgaaaacacagtgtactgtgggaagacataacaaagtggttctaactggcaaagagtttatttagtggaaagaggtaaaaacacgtgggaaagaaagaatatttagaacccaccaaggtaagaaagattaggttgataaaaactaaaatcacacagaaatatgatcattaagtccagactgacataaatcatagacaaatttgagtcacttaatttccataaaatcaatttgatcctcatttttataacattattcttcctttgctgtgtatttatttaatttttaaaatttatttttttttgagacgaggtcttgctttgttgcccagggtggagtgcagtggcatgatctcagctcactgcaacctccacctcctgggttcaagtgagtctcctgcctcagcctcccaagtagtgggaatcacaggtgtgtaacaccatgcctggctaatttttgtatttttagtagagacggggttttgccaagttggccaggctggtctcgaactcctgacctcagatgatccacccaccttggcctcccaaagtactgagattacaggtatgttcctttgctttttaaatcgagtcctgaggtgactcacgcctgtaatcccagcacctcgggaggccaaggtgggcagatcacttgaggtcaggagttcgagaccagcctggccaacatagtgaaaccctgtctctattaaaaatataaaaattagccagatgtggtggtgtgtacctatagtcccagttactcaggaagctgaggcatgagaatcgcctgaacccaggaagcagaggttgcagtgagccccgccaccttactccagcctggccaacagagcatgcctttgtctgaaaaataaataaataaatacataaatcgagtcctgaatctggaataacactaatcttatttatttatttacttatttattcatttattttcagagacaaagtctgtcacccaggatagactgagattatacctccctgcagcctcaaactcctgggctcaagtggtcctcccacctcagcctcagcctcccaagaagctgggactacagacacatgccaccaagtcaggctaatttaaattttttttttttttttttttagagatggggttctcactatgttgtctaggttggtctcaaactcctggcctcaagcaattctcgaacatcagcctgcaaagtgctgggattacaggcataagccatcatgcctaacactaaataaatctaatttcaaatggtataataacttttattttctttttgaaactgacttctgaattttaagatttgcatcatacctgctttatgcctgtcaattccatgcaaaattctgaaagaattggatgttcctgaggttgaacataagcctggaactcagagtcaatctgtccagttgatgtgttcagcaacactgctggaaactcaactaaatgaaagaataatcaattgacagttgaataaataatttttaaattaatcctgtaatcatcctaaattaaacatgttaccattttaattaaacaaccagttttcagtaaaagcatactaaaatgaccaaagcagtgtgacataaaggttataataaagttatgctaaagtcaaaatattgaagttatgagcatgttgtcttaaaagaaaacaatataattaaataaatataaaaaccatatggaatataaaatttactttttttgcaaaggcatttttttcagtttctatgccattgaggtgttgtatgtaatataaaacaactattttatataataacacatttaggtatttgagattttgctcttttttattcaacataagttttgcattaaactaccaatgcatagaccatcctgttttcttaaacttttggctgattcagatctataaactttaaagtgactcatctagtgccagctttggccattcgtagcccagacttacttatttcctggctatggtggtgcttcccatcattccagcatgtcgattcaaaatcaatgacaattaagtagtcaaacaactgctctgcaaaagatcaagttgttcttatgctttaccagtgctgaaaatgcaaggctacaaaatgcaaagaaactaagcatactactcactggatttgcttcttccgagatttccatttgctggcgcaattgactttctcctaattaatccaagctgcctaaaaatgtgaagcaatccaaatatgatcaatgaactcattcacactcctgtttgagtaggctaccaaactaatggtactgggcaacaatctcattatttattgtgactgaggggaaatcgaactggactttggctttacctgcacaggcctcgaaagtacatatttgcaaattaggctaatttgttggttttgtttttgagacagggtcttgctctgtcacgtaggttgcagtgcagtggtatgatcaccactcactacagccttaatctcctgggctcaagcaatcctcccaccacagtctcctgactaagactacagatgcatgccaccacggcccattagttttaatttttttttttttttgaaggcagggcctcactatgttacccaggctcatctcgaactcctgagctccagcaatcctcccacctcagcccctcaaagtgctgggattacaggcctgagccactgtgtccagccaatttacactaattttatgttacccttgttttacagtaatactgagtaactcatttgagttcctacaatcatttgattgtagaggtaaaaatgcactgaaaatcttatttttccccctgcattttttaagctcttgctatgtgtacagtgcagttttaagaagacaagacaatgtaggacatggttcagtcttccagtttaaaaatctgggtaaagaaacaaaagatagggccaggtaaagtggctcatgcctgtaatcccagcactttgggaggccaaggcaggtggattgcttgagctccggagttcgagaccagcctgagcaacatggtgaaaccccgtctctacaaaaattataaaacctagctggggcgtgatggtgcatacctgtagtcccaactactcaggaggctaaggtgggaggattgcttgagcccgggaggtggagactgcagtgagccgagatcatgccactgcactccagcatgggcaacagagcgagaccctgtctcaaaaaaataaataaataaaataaaataagaaaaaaagagaagagcttactgaggtcttaagtgcaagtaaaacaaactacttggtattagcaggtagagttttaactaggcagacacctcctgtagttttctgtgtttgctaagagtgggaagtgccaggatttgggaataataaatatcatttattgactgcttactacatagcaggtactaaaattaaactaagatgatggcctcctttaatcctcaacaagtgtagtagctagaaacttttcctacctatattttatggatgagaaaactgattcttaatttgccaaagaacatagctttggtatgtgaacccaagactgtccaattctgaagctcatgctatttgctattatattacatctttctagtaatcagaaatatgcacagcgcatccaggaatcagggaggacacaataattcatattgtgaattaaaaggatcactaggccaggcaccgtggctcacacctgtaaccccagcactttgggaggttgaggcgggtggatcacctgaggtcgggagttcgagaacagtctgaccaacatagagaaaccccatttctactaaaaatacaaaattagctgggtgtggtggtgcatgcctgtaatcccagctacttgggaggctgaggcaggagaatgacttgaacccgggaggcagaggttatggtaagccgagatcgcaccactgcactctagcctaggcaacaaaactccgtctcaaaaaaaaaaaaaaagatcactagaaaatgggtttgtaaaaagtagaggttcctcttcaaagacttccttccccgtctaattaggaataaatagtaacttctcttagagcaaaatttattcaaagacctgtgctaacattcttaaatatctgctagatataataaagaaatcaatgtactttatgttcttagctcccacaatttagcctaaatatttgccctggcatgcttatactggtccaatcaaacattaggtcatagcctgttcctcttccttacttaaaagtgtttttacctttctcagcattccacaagttacttccttcttcctttgttctcctctgcctttgcctcttttaaaaagttctatgttgctagtcagtcgggacaaatacagaatgtgaggtcccgttccagccaaaggaaaccggacacagcagtagggtggacgcgccacgttataaatgaccctgtctcctttgttcagtgtactctcctggcaaaactgctggcgagtgtaccctttctgcaggaagtaaaaatggccttactaaataaattaaatttaagtttaagttctatttctttacagcaccgaggaacgagcatttcgaacaggttgaacaccttgacagattcagtgtgtggcctgcctgagacctccaaccagtctgcagggcactgtcacgtccagtcgtttcccaaggcctaaaataggcaggcactggctcaaggccacacagtcaaggccccagggttcgtccgcctcgggctcctgtcaccctcgggtagaaggtggcccaaggctgaagaccgaggtccagggaggcgcctttccaaccgtgccagagagggcaggtcgcagacgccggggctgcggggaatagaggccctcaccgcagatgccacctgccgtgccctgctctgcggccaacgccagcgctggacccggagctacccgcccccgacccggaactccctcgagtaccgcgcgagccgcttggtcgccattcccgacactccttgcttttccaagtccagctgccggaagtcgctcgacttctacttccggtccgttcaaaaagcccgcgaggctgaggggcggttgttgttggcagctgtggctaaggaggggagaacctctgctccccgcccgtcttctcttctgcgtttcccgggctagggggcgtggggagtggttttaggcggcgaagccgctcggcagcaccttccttctttgccaggcagacgcccgttgtagccgttggggaaccgttgagaatccggtaaccgatgcggacggtaaagccgtttgggttagagcggcgcgggtgtccagtccgcggaacggggagatcgttggcaccttcgcttttttaggggaacggggatagttcggtaaactgaattgagaagcggatccgagggaggttgaaagctgtcaagcccgtgtagctctcccgctaggaggcggcacrcgggggaataggggcgctggagtttccccagctctacctcatctttctccacagccatggagccagagagggaagggaccgagagacaccccaggaaggtcagggaaagcaggcaggccccaaataagctggtcggggcagctgaggcgatgaaagccggttgggatctygaggagagtcagcccgaggccaaggtgagcaacggggatcccgagcaggcggccctaggcggtttggagctcccggaccctcgcccaaccgccgtcgggggcactggattcgggcgggctctccgccctggcctctccgaacctgatccctgatcattaaaatgggaatgagtgtaataccaccttcctgcaacaaggctgtcattggctgtcactgggatagtgagtcggccgagtgcggtggctcatgcctgtaattccagcactttgggaggccgaggcgggcggatcacgaggtcaggagttcgagaccagccttgtcaacatggagaaatccccgtctctaccaaaaacacacacacaaaattagccaggcgtggtagtgggtgactgtaatcccacctacttgggaggctgaggcaggagaatcgctagaacccaggaaccagaggttgcaatgagccaagaccacgccattacactccaccctggacaacaagaaagaaatcacgtctcagaaaaaaaaaaaaaaaaaaaaaaactgggatggtgggccgggtgcagtggctcacgcctgtaatcccagcagtttgggaggccaaggcgggagcatcatttgaggccaggaattcaagaccagcctgggcaatatagcaaggaccccatctcttaaaaaaaaaaaacaaaaaacaaaacaaaaaaaaaactgcctgtacataataggaatgttcatcgatatcctggggcacaaaaatacaattccttgccctcgtgcagtttacattccagtagggcgggggtccccaaccccctgtgcacagactagtacctgcctgtccatggggtccccaacccactgtccacagctggcctgttaggaaccgggccacaaagcagcaggaggtgagcggtggccgatagaacgttaccccctgagctccacctaggcattagattctcataggaatgtgccaaacctattgtgagccctattgtgaactttgcatacgarggtcctaggtggcatgctgcttatgagactctaatgataaatgtaatgcacttgaatcaccccgaaaccatccccccagcccttctcccagtcagtggaaagattatctaacacgaaaccggtccctggtgccaacggttggggaccgctgcaataggggaataaaaaggctgattatccctatcatccttaccatttactgagaactaaatatacttcattcatcccttcagtcgttcattgggcttttttgtttgtttttgtgtttgagacagggtctctgctctgctggactcaggctggactacagtggtgtgacaaggatcctcctgtctctgcctcttacaggcatgagccactgcacccagctattcattggtttttattgtctgccatgtgctggggcactgacctaggtgcttggggtacatcagtgaatcaagttcactgccctagtaggtcttatattctagtgggcagagacaaatgataaaaataagttataatatgtgagagagggattagggatgtgatttttttttttttttttttttttgaggtggagtctccctctgttgcccaggctggatttggctcactgcaacttttgcctcccaggttgaagtgatcctcccacctcagttccaccaattagatgggactacagatgtgtgccactgtgccagctaatttttcttttttttgtagagacggggttttgccatgttgcccaggctggtcttgaactcctggacttaagcgatctgtccaccttggcctctgcaagttctgggattacaggcatgagccactgcttttttttgtttttttttcgtttktttttttttaaagagagacagggtctccaactcctgggatcaggagattcacctgcctcagcctcccatagtgctggggattacatgtgtgagccactgcacccagctgaaaattttttttattaaagtgggattccagtttttttgcctatcaaatttgcaaaaaaatgtttaatgtttatgtggttagtgtaaggagattgacaatcacatattttgttatgttgaaacaatctcaaacttttagaaaagttgtaagaatagtatcaaaacctcccctcaaccaacatttgaaagtagttgctgacacaatggtctttttctacccaycctcaagatattttattatatattctctataaacctacataatcacaatgcaaccatcaaaattggaaattaccatggatatatcatgaccatctactcctcagatgccatccaaattttctgtagttgtttgaataacgctttttagcaataagatccagtctagaattgtgttaaatttaattgtcatgtctccatcaaacagttccttagtcttcccttgatattcatgactttactgcatttgaataatcctgggccaattattttgttgaatgtcccttaaattagatttgtctgtttcttcattgattagattcaggttatatacatctttagcaggaatatcacaggagtgatactctgctcccttgcagattgtacacaatttgatttgtcccattattggtgatattaaccttgataactagattaagatagtttctactaaagttctctaaagttatctttttctctgtgtaattttcattcttatttttttgagacaggatcttgctatattgcccaggctagtctggaattcctgggctaaagcaatcctcccacctcagcctcagtgtagctgaggttacaggcccaagccactgctcccagctgtctgtaatgtgcttcctcaaacactttgggcttatgcatttacttttttatcagtatgatgaactcagtggtacctattttgttcagtgtgttactatcttttactggattgtgatgctttaaatatccaagattttgtcattaagctagcttctgtggccttttgacatgacaacatcattctttgagcatgtcattactttctggcacaagaagatattccaggctcatatgtgctttccctgccccaagcctggaatcagtcatttctcttagggtacctggttctttttagtgtagaatgatatttagatttgggtgctatggtgatgttaatacagatgcttcttcacttaaaataagattacgtcccaataaatccatcgtaaattgaaaattttgtaagttgaaagtgtatacacacacacatacttacatttaaatatttttctgtattttacttatgtgaattcacatcagtatctccactttaatccaaatccagtaatacagggttcattctattcattctagttttctcctttttttttttcttttgagacaaaagtcttgccctgtcacccaggctggagtgcagtggcatgatctctgctcattgcaacctctccctcccagcgattctcctacctcagcctcctgagtagctgggattacaggcacccaccaccacgcctggctaatttttgtacatttagtggagatggcgtttgaccatgttggctggtctcaaattcatgacctcaagtgatctgcccacctcggcttcgcaaagtgttgggattacaggcgtgaaccaccgcgcccagtccattttcatatttgtaacttccttcactaacaatgagaaacccgacacccaacatcttcagtatatttgatcaatccttattgctgccgctgacccaccctcacaccctcttgactctgcttaggctctgtcaccctgcactggctccatcaccttgtaccaggtcatcttcctttgtgagcaccctcatcctatgacaggtggctgccaccatccctctcaggtttataccctcatcctgttcaggctttaaaccctgcaacaggccactactgtccctcagcattgatgccctccttaccctaaatagtttctgacatctgatgtcaggactcactgccctcccttccttcctgtatgggtgacgtccttgtgctgctgaggctttgacaccccacaccagagcaccctcctgcatgaatgtcctcagcttctgctcctagtcctggactgtctcctctacaggacaccttcctcacccaactcaggctcttgacatcccatgcctggcaaccagggttactcaccgccatatagactccatcttgctcagtctcaccttattaatctcatgtttttatttggtaaaaacaaactggcatattctttcaggagttcatttgaaccaggaattgatcctaagaaagtagatagatgtacaaaggtgtctgtacaaggatgttcatcataatgttgtttgtaatttaaaaaaccagtgttatcaatagggaatgtttttcagatatattataaattttcaggtaaatttagaaaatggactattattcaagtattaaaattgattttttttaactgatatggaaagatacagcttaagttcgggagtagggagttggtttcaaaaaagaatgattgataaaatccactgcgggctgtatagtatagagataagcctgcattccagtcttggttctatcatttatctgtctctccaatttatctgtaaaatggggatgatagtagtacacacttacaaagttgtgagaattaaatgatttaatgcatgtaaaatgatcagaactgtgtttygctaatgtaagagtttaacattagcttaaggccatgggaatacattagcaataatatctaatgtttattaagtacttatgtcaggtactagcctcagtacattgtacttgaactatttcattggtcctcccaattatttaatgagataaaattataattactctctagatgaggaaactgagtcttagaaaggctatggcactggtccaagatgatgatgatggtccaaggctatggcactggtccaagcctggtgtttgaactcaggtagtatgactagggcttgagcttctaaccgctatgctctgctgcctcgcagaccaaaacgaaagtggtgattacctctaagttgtacttttattttaattatctctgaggtgacttttattttcgtttctctgtatcatttattttacaattctctgttaatgagtcttttgtaacaaacacgaattactttattaaacaaatataggctgggcgtggtgactataggccgggcgtggtggctcatgcttgtaatcccagcactttgggaggctgaggagagcagatcgcttgagctcaggagctcgagaccagcctgggcaacatggtaaaaactcatctctaccaaaaatacaaaaaaaattagccaggtgtggtggcatacatctgtggtcccagctactcaggacactgaggcaggaggatcgcttgagcctgggaggcagaggttgtagtgagcaaagatagcgccactgtactccatcctgggtgacagagtgagactctgtctcagaaaagaaaaaaacaagtataagttcaaagcctttttaaaggggttgggagctttgctgaactcttgttgcccaggggataaattctgattcattagcttaggccgcattgatctatgatctggctcctgcttccctctcctcatacctccactactatgcaacatgcaatcctggctccttgccaaaccatactacatgttgaatgcgatgttccctccaacatggcattgttttcaaggctcagcctcagtattttcatctcagtagccttccccaaactctctaacccctaaggcagttagactccttgttctcatagctttgtaatagcacttacccacactgtgttggaattagctattgctttctctccctagtagaatggactctttgagagcatgaattatgctttatttatcctattcctagcatgtaaccaagtatctataattcagttttgtgtcaatgatarttactttattaataatgtcatacctaccacatattgttattttaggccatcattttcaattaattagcacttccttatgttagaatatacctgtatgttaaagtaatcagaagctagaataatttaacttgctttgttggtattcttgataaccaataatggcttgctacgccctgattaatctttgcagaaagcccgcttatctaccattttatttactgacaactgtgaagtaacccatgaccagctgtgtgaattgctgaagtatgcagttctgggcaaatccaatgttccaaaacccaggtatgagatgaatttaaatggtgggtattgaccagcggtttcttttttyyttttttttttttacctctcccaaggctccatcattcaaaccagaggtttcaaactggcttatcgacagtatttttttgctatgcagcatgtcctgaattttttatgatggctgccaagtgttaattctggaaattcctatataaaaatctacattttcttcttccaaaaactcaaagatggcagctatccctatattcccacatggcaataatttgtcaaagctgagtggtggtctccccctttatatgggacatgtatactacaatgtcctacctggcctgcttcccatatttacagtatctgtctggctactatagatattttagtttgtttcccgtgwtgcagactcagctgaaataacaatgatctgtgaagaattccagttaatcttttttctttcttttacaaataaaaggcaaagagagcccmggcatagtggctcacagttataatcccagcactttgggaggccaaggtgtgaggatcacttgagtcccagagtctgagaccagcctgggcaacatagcgagactcaggccctacaaaaaaaaaagagaatcttactgttctgatattgttggtgccattattaagtgtcttatgaaaaatattttgtatgtatgcaaataatacacacgtctttctgggggaggttgttatgaattggctagctacttcgagaactgtcttctccatcaacaattacagccatcagtctgtcagtttatctaaaactgtttttttttttttttggtaggttttatgtctctattgcaactacccaacttggccattgtagcccaaagcagccatacataacacatagacaaataagcatgactgtagttcaatagtcttatttacaaaaatgggtggagcaggatttgacatttttttggtgggggatggagcctcgctctgtcacctaggctggagtgcagtggcacgatctccgctcaatgcaacctccacctcccaggttcaagtgatcctcttgcctcagcctccagagtagctaggattgtaggctcatacaaccaggcccagctaatttttttgtattttttttagtagagatggggtttcgccatgttgcccaggttggtcttgaactcctgacctcaagtcatccacctgcctcggcctcccaaagtgctgggattacaggcgtgagtcaccgtgcccagcsaaaactgaatttcttaaagccagccatttgattccctggtttaggaaggaccgcagagtaggttggtatcttagggatgactttgtaaagtgagcttagttctgattccaaacaaaccttaataggactgtgaatttaaatgcattgcattttgcttggtattttactggatttgaatacaacaagtatttatctctagggatctttatttgaattctgtgcaataatggctgtcttccagttccaggcagacggtgaatggtgataaattctattaactctcactcactgcttttcctgcnccttctcccctatttcccctctatatgactgtaactgacttaaggccatctgtcttaactgtgttggtttgatttcttggcagctggtgccagctttttcatcaaaaccacctaaacaacgtagtggtttttgttctgcagggaatgagtcagctacacttttacaggttctatttggagtttggatgtcttcgaaaagcattcagacatgtaagttaagaatactttgtactaggggctgagtctgttttcccattctgagactaatacatgtgtcagggaccatgctccttggcaacctaactgaacaaacagtaggggatatagaaagcaaaaggaccttagaggcctcatgtagatttgtctctgattttctttggaaatctaggcaaactcttattcccaggttataatctgtagctcctaggttgatattgttctattttatttgggctatggtgttttcagaaattgtaaaatataatacaagctgagttttctacctctctttaaaaaaatcgcaagattgggcacccttaaaacagtatatggaactgaatagcagttgtcatctttaaaaagaggcacctgctgtccattttcccgtagcctcttccatttcctagtgacccatttcatccatttattcctgaaggcatttgagttggtgagccctaatttaacctccctgggtcaccattttcttttttgctttcatttattgagcacttcctgtgtatcaggctctctattaaccacggaccacctgctacacgtatcatctttaattatcacaatagtcttataaaatagatactttttaatttccattttgtacatgagaaactgagtaacttgcccgagttccagctagtaagtggtagggctgaaatttaagcccaggtgaacctgaagctgaagctctcaacctttttgccrtgtgataccatctattctgatggcaatggcatgctttccaatgaaataatagatttggaagaactttgaaaatacaaagggacttttcttgtctaagttgtatatttctgtaaagtttgtctattttacaatatataatcatagggatcagttagtgttgtgtggcttcatttacttagtcacttttctatattaaggaaacagttcttattttaaaatgctaacaattactgtctagaactttcaaagcactgaggtgacaataaaagtccaggcctttcacagtattttagctgttttcaaccatttttgtaaaacctgttaatatattttcagaaattccgcttgcctccaccatcatctgattttctagctgatgttgttgggctacaaactgaacaaagagctggagatctgcccaagacaatggaaggtatagctatgatgctggtttgatgctttgctcactctaaaagatacggatatgattgtaagtaggtttagcacaacaaaactcaattctaactagcttaagcacaaaaacaatttttttttttttgaaacgggggtctcactcttgtcacccaggtgtgagtgcagtggcgtgatcacacggctcactgcagccttgacctcccagactcaagcagtccttccacctcagcctcctgagtagctggggaactaccagcacaggccacatccccagctaattttgtttgtttgtttgtttgtttgttttgagaaacggggctccactgtgctgcccaggctggtctcaaactcctgagctcaagtgatcttcccaccttggcttcccaaagtgtggggattataggcatgagccaccatacctgggccacaaaaacagtttttttaaggaaaaatgggcaggtactcagggaagttagatagcaggaaccacagccagggttcatgtctcagaaacaatctggttagatagctaaggatacctgggtatcactgatgttggactcttatgaattactgtgaataatttctaaactgtcactgggtctttgtacccaccagtgtacaggtgggaaggaagatcttgcctttgactaatataagggatacctgctgatactactcacagtgaagaataggcaggaggtttagatactagccagctgaaagattcatgatagcagtgtgtttttcaaactgtgggttgtgtcctattrgtaagttataagtaatctttttggttttgcaggaaggtgagtgatagagtagtataggacttatcagagttagttgcatatagtaaggttaggtattgttcaatgatactctattttgtgttcagaaataattaattgaataattgcactgagggaacatgaaaaagtagtgaggagtaacttgatttcttatctcctctagaaatgtgcttgcattatcctctgtcctaatccccacttctaattttctatctttctgttgttctcttcttctcatggatgcccatttttgatctgcaattgtatttgatttgatttgcactgtattttaaacatctgtgattaaatcacagagtaatcattatgagattctaggttcaagtaaaagcatcacgttgcaaaagaaaagatgtaatcaggaaaaagaaatctgacatgtttgaagagtacagcttgttggacatgctgagaagaataggaggaggtggtgatgagagacaaagctggaaaggcagattaaagccatatcctgcaggctttgtttttattttatgttttatttttatattctgtaccagccacggagagacaacctacaggctttgaatgtcatgccaaaagaatttggattttattctgtaggccttgaggagccagagaggttagggcaacttctccatcctcctaagtatttcacttcattttccagtgctaaatatcagagtccccaaggcatagtccctcgcactctgatcttcgttaatcagtctttccttcggagcattcatctgttcttgccaagtttacctattagttttctttgaatgactcctgtatctttatctctaggtctgatgccccagattgcaggcctgcattctcaactgcctgctgaatattccaattgctatttggatattctactgtcctcagtcataacatagctaaatgcgtttttctcatcctcaaataatggtctcttcatattccctcttgttggtgtcatttttctctaagacaccagtgttgaattttacagttttcttttggctccctatccccaaactgtctgcatgcctaattccctttgctcctataaatctctattcagatgtcaatttaacagagaccttctcagctcatcctatacaaaatatatgacagtaaccctttccctgccccaatatttcctatacttttctcctccttttcttcaaagcccttatcttacctgatatattacrtatttatttgtttattatccatatttccaactataagttaaatgtcatgaggaattttgttggttttgtgcattggggaattcctagtggccaaaacagtgccggctacataataaagttataaatatttaaatattttgctggctgaataattttttcaccatgttctaccagtttttcatgtatgttttatatatccctttttctccatagcttccactatcttaattcagatgctgtaacaacttctttttgaaacagagtctcgctctgtcgctgaggctggagtgcagtgggatgatcccagttcactgcaacctctgccacctgggttcaagcgatttttgtgcctctcagcctcctgagtagctgggactacaggcgtgcaccaccataccagctaatttttgtatttttagtarcgacagagtttcaccatgtttggccaggctggtattgaacgcttggcctcaagtgatccacctgcctcagcctcttaaaatgctgaaagtacaggcgtgagccactgcacttggccttttttcatcaacatttattttaagttcctgggtacatgtgcaggatgtgtaggtttgttacataggtaaatgtgtgctgtagtggtttactacacagatcagccaatcacctaggtattaagctcagcctccattaactattcttcctgatgctttacctccaccaacccctctgacaaccccaaatgtgtgttgtcatgtgtccatgtgttttcatcattcagctccctcttataagtgagaacatggtgttgtttggttttctgtttctgcatttgctgagaataatggcttccagttccatccatgtccctgcaaaggacatggtcttgttcctttttgtggctgcatagtattccatggtgtatatgtaccacatttttttttatctgatctatcatttatgggcatttgggttgataccatgtcttttccacctgcgcatatctttataatagaatgatttatattcctttagaatatacccagtaacatgattgctggctcaaatggtatttctgcccctagcagatgctcataattttttggccagaattattgtaaagccctttctagcctctttctacttcgctttctttctttcttcatttctttcctttcctttcctttcttttcctttcctttccttcctttcttttctttctttctttcctccttttttttttttttttttaaatttaggctgggcgcagtggctcacacctataatcccagcactttgggaggctgaggcaggtggatcacctgaggtcgggagttggagaccagcctgaccaacatggagaaatcccatctctactaaaaatacaaaattagccgggcgtggtggtacatgcctgtaatcccagctactcaggaggctgaggcaggagaatcatctgaacctgggaggcagaggttacagtgagccgagatcgcgccattgcactccagcctgggcaacaagagcgaaactccgtctccaaaaaaaaaaaaaaatttagagtcaggatctccctctgttgcccaggctaaagtgcagtggtacaatctaagctcactgcagtctcaaactcctacattcaagcgatcctcctgcctcagcctcctgagtagctaagacttgcagttatgcactaccatgcctggctaatttttgtttttgtagagactgggtcttgctccgttgcctagggtggtctcaaactcctggactcaagcaatcctcttgccttggcctcccaaattgctgggattacaggcatgccatgcacccagcctctactccattttttacaaatctttgaggttgatgtttcttaaaacactgctttaattacatcacttccgttctcaggagctttttgtggctccccattacgtattgaatggtggacgaaagttaattatgctcctgtctcaactttgtttcctatgctcatctcttgcacagacctttctttcttcattactggtctactgacaaaccaagtttactctacatttctgtcttgcctggaatgtcctcttctacttatgatactttggctattttctttacaaggatcagctactcacttaggtcatcttgagcaaatattgtttgaagaaggatgtatgtgggtagaaagccagcaggaacctaagtgcccctagtaaaaagattttctccaaccctttcatagcatctacttatctgtgtattttcttttctcttctgactagtcagttctctctctttatatatatatatatatatatatatatatatattttttttttttttttttttttttttttttttttttgagacagagcctcgctctgttgcccaggcaggagtgcagtggcacaatctctgctcactgcaacctctgcctcccgagttcaagcaattcttgtgccttagcctcctgaataggtggaattacaggtgcatgccactacacctggctaatttttgtgtttttagtagagatggggtttcaccatgttggccaggctggtcttgaactcctgacctcaagggttccacctacctcagcctcccaaagtgctggaattacaggtgtgagccactgtacctagcccagttctttatattttttagtgaaaatccttaaagcaggcggtctgatgaacttaactacttaagattttccctctgagaacatgtcttgataaggtcaatctatagatgatctctcttgagccaggtcatacccttaatccaatcagtaatggtccctggttaaagaacaagcttttgctgcttaaataggtggctgagggtggagtatatttagctagaatgaaccataagggagagacaggcactgtaaagaacaggttgaatataccaactatctgaattctgtcttttttttaagactcaatcttttcctttcttgatctctgacactctattgtgaagtatattcctcctcctatccctttactgttttagctcatttgggacttcattttctctgtgttttttttgtttgttttgagacggagtctcgctctgctgcccaggctggagtgcagtggcgcgatctcggctcactgcaagctctgcctctcgggttcacgccattctgccacctcagcctcccaagtagctgggactacaggcacccaccaccacacccggctaattttgtttttgtatttttagtagagacagggtttcaccatgttagccaggatggatggtctcgatctcctgacctcgtgatctgcctgcctcagcctcccaaagtgctgggattacaggcgtgagccactgcaccctgcctttctgtgttcttataattgtaatagattgcaagcccctaaatggttggggctgagttttatacatcttttgatcttccttgtgcttagcctatacaaccttaggagacatttcttctagggttcttaaacacacattctaatatacgttcaattgtttttctttcagggcctttaccttctaatgcaaaagccgccatcaaccttcaggatgatcccatcattcaaaagtatggctctaagaaagtgggcttgaccagatgccttctgacaaaggaggaaatgagaacgtttcactttccattacaaggttggcttaggcttactctgatattgctaacaatgtaagaatatctaacagcttatttaaatactactgtttgagattcatttatctggctgttttctgagtggcttattcttatttcatcttctattaatgaggaaatatcttcggcacagtgtatctcaaaagtgtgtgatgtctaccgtgattggcaaagtgatgattttaggtagtacatgaatgtgacattaaatagcattgaaataatatttaataagaaagttattccctttccttttcattcagttttctttcatttcttcttaatatattaaaaacagtcagtatgtctttaacattttaacacttttccagtacttctaattctcctcccacactgcccccatatttctttaacaaatagagcaggtctaggctcggagccttggtcaattatatagcaagaatttaataaaagtactttgatttcattttattttctttgttacctcctaattatagcaatgataattaaatttccttttttaaaaacagatataatttaacataccacacaattcacccacttaaagttacaattaagtattttttactatgttcacagagttgtacagccatcaccacaattttagaacacttctatcatcccaaaagaaaccctgtattataatttccctccaactccctgagcctttgacaaccgttaatctagtttctatatatagatttacccattctgggtatttcctgtaagtggatgtgcaatatgtgggctttgtgactggcttctttaacttagcataatgttctcaagcttcatccatgttgtagcatgtatcagtactacatttattttcactgcttaatgatactgcattggatagactgttcatcaggtgatggacatttgggttgtttccactttttagttaataatgctgctatgaatattcaggtccaagttttttgtgtgggcacatgctttcatttctgttgggtatatacctaggagtataattgctgggtcatgtgacaactctgtgtttaaccttttgaggaactgtcaggctgtgaaagctgccgtaccattttactttcccaccagcagcatatgaggtttccagttcctgcacattcttgccaacatttactattatcttgtctgaatatatccatcctagtgggtatgaagtggtgtctcattgtgattttgatttgcatgtttctgttggctgatgattttgagcaacttttcacatgcttattagtcatttgtatagcttcagagaactgtctattcagatcctttgtccatttttaaattgggctgtattttatcatggaattatyggagttcttattttctggatgcataaattttatttttttaattttttaagttgatgtaggcgtgttttataggtgccaggcaccgtactaagtgcctttttgtacattaactggcagtcctatgatatatgaactaaattttaactccattttatacatggcttttttctctatttattttaacatatttataaccatctttttcttgaggttgcactactgtcacatgagcacgtagtaagggcagtactgctaacacctataaaacaccactgataatatagataaggtaggcagcaaatatagtgtctgtgagatttgaggctgcctttcttctctgggatagaccatcttttgattcttttcattgcgattagttggaaatttcacagtaccgggaatcagaaattggtcaaaggtttgcatagccccctttgttccgtgtcaaacaagatttagatgttacctttactgctccagcctctgcctgaaggtagaaatcttcaacaattcagatgcttttgggtttttgagctaaatatgcatggttatggactcagggttcacaaatagagggagtaccttaaatctatagctgagcctctgtaggaaatatgtgattccagaaaatgcaggcaaggctctgaataggtgtttcagaggaatctcacaggttgagttgggtggagggacacatatggtgaatgttacttaaactttcttcctactatgaaatccttttagatctccattatggtggaatctcattcctattttctcttcctgtatttaggaaagaaagatgccacatacagttatttgcatactttattcattctttcttagtgctgacatggaaagcgcctaatgactttgggtttagccatgatttagttatctcttttctcatgaggaggaaaaattgttacttggtaactgccaggaagttcaagccccagaatctcctcctaacagcaagcctacattattctttcaatataaaaatgagtagatggagaaaaacttgaggacagagattgtatcttatttagtcattgtatttcaagtgtctaacataccaacatatctgactaaaatatctagtattgtagttttacctgcttgaatctaagagtgatgtttaccatctctattctaaaggcaaacattttcttcctttttctcctaggttttcctgattgtgaaaactttttacttaccaaatgtaatggttctatagcagacaatagtcctctctttggacttgactgtgaaatggcacgtactacttttaatttttcaattggagtgttgcaagctgaggtctagtagaaaatgatttcttgagtctaatgcactaatgaacgaatacattcatttttagtattctgttttaatagctgaaagtaggtccttttactcacactttagaaaacttagatctgtattccaggataaagaataaatatcacataagtggctgggtgccgtggctcacacctgtaatcccagcactttgggaggctgaggcgggtggatcatgaggtcaggagatcaagaccatcctggccaacatggtgaaaccccatctctactaaaaatacaaaaaattagctgggcatggcagcatgcacctgtagtcccaggtactcgggaggctgaggcaggagaatcgcttgaacccagtaggcagaggttgcagtgagctgagatagcgccactgcactccagcctggcgacagagtgagactcgatctcaaaaaaaaaaaatcacgttttccaactagttactatgtttaatcaggtctttgcatgttrctagaagttgattccttgtgtttgaagaagtattttgttgttgctgccatgaggactttgccttaattgttggtttggcttagttttacaccttgaagatcagaaataggatttccctgcttaagttcccctcgtgctttgctttatctaattgtagtaagcctcttttcaaagacagtgcatcccctctcagtactcaggaaacagtttctcaattcttaatagagtaactaagacctaaaatttgagaatctgacatatcagggtgtatatcctgtccttgcctgttagtggctatgtcgccttagacaaatacccctaacctatcagcctcggcttctccctctgtgaagtgggggtaataataaagcctacctcaaaaggtaattatgagagtggcatatataaaattcttagtacagcactagctgataatagaatgggcttcataaaaattacctattagtggtatttagcataatactggatatagtacacactccataaatggtagatrcaattattaatattatttgcattcatcttctttgtgcagactacactgtgttgatcctcttaagtgtaacattcagcagcctgcccagctttaatttcactcacactagatcctctagaaagcaagtttgtgccattgctgcagggaccctggtagattacagtagatggcagttgacatagtgtaaatagtaagaagaagcaataacttccacagttcagcagcctgactacatgttggtctttcagtgcctcacatccaaggggagagagctaacacgcatctcactggttgctgaaggaggctgctgtgttatggatgaactggtcaaacctgaaaacaagattctggactacctcaccaggtatttttcaccttgcctgcagctcttctaagagctatcgggctagaatggaataatacttaagaatggcccacagcttcagtttagttaggttttatctacttaaatattatcaaaggttagggcatcacataggtatattttaatgctgaaattgcacaatgtcagtgtataatgctcttgcccttcttgatcttcaatcttcttgtgaccttaagtcagcagaatattatcttccttgttccagaatctcccaattataatcattatctacaactgccaaacagctaragctttgctttctgataagacctcatctgaaaatctgcaagtcatcatttggcagtcaagtgatgttagagcttaatctgccttgacccccaaaacacaaacraatatttttcataacagaaatttgaagctgaaaatgttagtctacttttccaaagattagcatgtaatctcagaatgtacacacagtgactaggcaagaagccagtgaaacattactgttcccatccgttgacgtggcaccagtagattcgtgatgacttagggacagagaggcaatgatagtgataaatactgtcctattagcagacttgacaattagattcttagagaacagtcacgtgtggcaaagttgtatgcacaagcatgtttgtcacagtattgcaaaaatgtgagtatataaatgtctgaaagtaggggattagttaaaatatgctgtatctgtataatggaatactctgtaaccatttaaaaggatgtgctaaatagatttattgatgtgcaaatgtgtttatgacatattataaatgatagattcattgtaaagcagctcatgcattatgattacatttttataaaaattaaatatatacctgaatctatatcaaaagtatggaacgacatttactaaaatgtaaaaaagcaatcatctctgggtgataggattatgactaatttttaattcttatttgtcactttggacactaagcatatatatattaacagtaattttaaaaaatgttatttttaaaatcactttccagagaggaaaacttgttaatatcctagcctgtccatttctctttttttaatgaaagcttttcgggaatcacgaagaagattcttaacccagtgacgaccaaactcaaagatgtacagaggcagttaaaagcactgcttcctcctgatgctgtgttagtgggccactccttagatttggatctcagagcactgaaagtgagtatctgatttaggactttgcattttcagtrtaaatgcctgttccatttatctcaaatctaaagtcttgggctcttctctcccaccctgctagcccacttgttttttcctttagcataagacactactcattttattctctttcttcctcagatgatacatccatatgttattgatacatcgttgctttatgtcagagagcagggcagaagatttaagctcaagttcttagccaaagttattttggggtaggtttgcttatatgctgtaatattgttctgacaaactgcatacaagttagcatgtagtatctaatttaatgcatattgcaaaattcagggtttctgctctctttgctttaaacatgtttttttgcatttcttatgaaatgaagaaattgtagcaatagagacaggggtttacattcacagtcgaggcttaatggacagaactgaaccatgaaggcagaagaggtaaccaaaatttcaaaacataacatacctatatgcctatacaaggtagtataacatacttatactgtcctattgtattaagacacatatgtacaaaggtgttcattataacatggtttaaaatagcaaaatagaaaacctcaaatattctagaagtctggttgagtaaattatggttatctgtattattgaatattttgttgttcagaagaatatgataaatctgtttgtgatatgaacacctctctaagacactcctgagaataagggatgcagagcaagatctatatatgcctcaatatttatatgatatagattagatttagttctatctataaatatatacatatattaagctttttaaaaacacctaagaaagtatttaagtatgtatagacacttatatacaaataaaaaagtttcaggaaggcaactttaaacaatggttagatctgagaaatgggcctggtccatttcttagagaagggcctggccagggagtcagccagaaactttttgttgggtagccttttgtccggatgctatgcttgctgtgaacaaagctattcctgattgttttgcacccccagttcctctcgcagggctgggcaattagctggaataaaggaaccttgatttttgtgatgcaaatctaattatcagaattctaacattttatatgtaatcagaacacttgagatggttgaaaaagcctatcattaaaagtgcttccagtatgtcaattttatattgactttccaggaaggatatacagtgtccagacagacttggtcatgatgccacagaagatgctagaacaatccttgaattggctcggtatttccttaagcatggcccaaaaaaggttagtatctttgcccagtgtgttcaccttttcttaaaatcatgggactagatcagattatcacagactaccaactcctattatctatttttatgaaaatggcagtgtgggccaggtgcagtggctcatgcctgtaatcccagcactttgggaggccagggtgggcagatcaccaggtcaggagttcgagaccagcctggccaatatggtgaaaccccgtctctactaaaaatacaaaaattagccaggtgtggtggcgcgtgcctgtagtcccagctactccagaggctgagacaggagaatcgcttgaaccagggaggcagaggttgcggggaggcagaggttgcagtgagccgagattgcaccactgcactccagcttaggtgacagagcaagacttcatctcaaaaaaaaaaaaaagaaaagaaaatggcagtgtgattgaatcctaaaaaaagaaaatggcagtgtgattgaagcctagcatgtatttcgaattaagacccatatcactagcataatgtggttaagtatatagtccctgcagttgggcttatctgttttaaaatatatgttctactatgtctagctgtataatctagggcaatttctctgaacaacatcagtttttggatctataatatgggaatacacacttttctgggatattgttgagagtaaatgagatattgtgtataaaattcttagcacagtgtcttgaatatactaagcactatmctggtggtgtggtgattattgtagttaatactaataattataaaaaatctgcatagatttttgttttcttggagtagggggagcatacaattgtttcaacagcagttcagtgggtaaatgttagaacaacacataagggagacatggaagaggacatagtctctgacaaactttattataatgcattctaacctattagattgtcccattgcatagtacattccatcatgactccattatgaaataaattgtactccacatagaataataagtaacagccagaatagtcttttgtgtcaggtggtagaaagacattctaacagatcttctttgagcatatagataataatagccaccactcactgaggtcttaagtgtactgttctaaaatgctgtatatacattatcttatttaatcctcacaacagccctgtgagttagctattatcattccaattttatacatgagcctttcgaggttaccaaaggttagataacttatctgaggtcccacagtcagtcagaggtggaaccagaattgaaacccaggtctgtcacattctgtcttttctgtataccagggattagcaaactttttctgtaaaggccaactagtaaatattgtaggctttgcagatcatattgtctttattgcagctactcaacttgctgtggtactgcaagagcagccatagacattatgtcaacactggtgggcacagctgaaataaaactttatttatttacaaaaaaatatgtattggtgtctgctaatctctgctctaaatcactacaataggttctaaaacccttttggtctcatgactctttttatattgttacccacacaatggtgtgttcagtcacttagtgggtgttaacccaatgaccactaccaaggaatatttatttttatttttattttttttgagacagagtctcactctgtttcccaggctggagtgcagtggtgcgatctctcttcactgcagcctctgcctccccggttcaagtgattctcctgcctcagcttcccgagcagctgggattacaggtgcctgccaccacaccttgctaattttttttttttttgtatttttattagagatagggtttcaccatgttggccaggctggtctcaaactcctaacctcaggtgatccacccatctcagcctcccaaagtgctgggattacaggcatgagtcactgtgcctggcccaagaggatttaacaaggggattttattactttgcaacaagtaagaacaccagggatagttcccaaagcactatctccccaaatgaaggcaaaagcagggcttttattttgctagtcggctgagtcattgcatgtaaaggcagggtttgttccttgacacatacatgtatagaaaatggagaataagttcctccctaggtgagatttttagtatggtaatgcagagagtttgccaagttcatctctaacttcaggcatctctggttccagctggtttttatcttgctgtagctggtggtcttcctgtacccttttgaaacaacaaggtgcaacaggggttacacttttatagtgtgcacctgaagacccagggactctgggttacaatatctatcaacatttaccatattagaaattaaataaatttttaatattagtttaagataaataaaaagccattatatgttaacacaaatcactttttttctttttctgttttttttttttttttttttttgagacggggtctcactgtgttgcctaagctggactggaactcctgggctcaagggatcctcctacttcagcctcctgagtagctggaacttaagcatatacagccactctgtccagctacaaataacttacttttatggaaaaaagaattttccataaaaattagtggaaagaacatcattgttttaggtatttttgtgaaaccttttaatatctagcttaatagaaaacaagtggcttttcatatctgctttcacattcagtctgttatgtcacatagttggagaaggaaggacctcaccccttgtgagaagatgtctggaaaccccaggattctcaaaccacacttggggcacttaattatgcttgatttccagtgaaaattgtgtctcacttggataaaaactaaccaaatctgaattaagcatgggcttaattaataataatgcattactattggttcattaattgtgacaaatgcaccatacaaatctattactaataggtaaaaatggaggtatgctatatgggaactctgtactattttcataatttttctgtaaatctaaactgattctaaaaaaaaagtttatttttaaaatttgtaactttaaaaattattctctctacatcacaactccctggtgggctcccactttacggaaggagaagaaataactagaatagacttct[450 bp omitted]gattgcagaactaaatctagaagcactagctaatcaccaagaaatacaagcagcaggccaagagcctaaaaacacagcagaagtacttcagcacccaaacacaaggtaatattttcagtttgaaacaagagcaaagacaaatggagtrtctagtttcttatttaacaacacctgagaatgtttttatcctcttttgagtctattaaaaactatttaccaaaaaatgataacatctatcacaaaaaccacggaaaaaataccaccttctagccttaatatatagtatttaatttctaattttctgaatctagtggctggtctaaaatgatatccttgatcaaaaaaaaaaaaaagaaaaaataattggaatacgttgaacctaggtagcactgggaaagatgatagactagttggtattttggctagaagagtcaatctgtagccttgttgtattgcccagactatgaaagacacacacacagactcaaaagggctttgtctccagactatagcaaatgtatcagatctttagaattttgcctaatcttttgatagagagctttgggtatatttcttgtttatccttcctctctctattgaagcaacactgtccaaaacaattttctgtgatgatggaagtgctctacatctgtgctatctcgtttggtagctgctagtcacatttgactagtgcagttgaggaactgaatttttaattttatttaattttaattttaatagctatatattgctagtggctaccatattgtataatgcaagtatagagaaataactgtcaggttctggaaaactgttgttcttaccttaactcttctacttctttatagtgttttagaatgcttggattcagtgggtcagaagcttctttttttgacccgggagacagatgctggtgaacttccatcttccagaaattgtcaaactattaagtgtctttcaaataaagaggtgagtggcctgctgaacctttgcaggttatattcaaagcagaggggaatgtagccctttgcacccatgccagtgtcaagctttttttcatcagcaaccctggctacagttagcaagcctggcttgtgtctcacatcttgtatggagtacctaagtcctcataggggcagaactgtcagctgccaatgcctgcttccagagcccagcaggcctctggctttggtcttgcatacatctttgagtttctgttgtgtttctggttcatggaaacgtttatcttggttttgagcctggctatatcctttcgattttttctttttatattttatgtatcattgctgtatgttaagtcagagaggctacatcaaacatgagcttattatgttatcatattcagaagatctgtgtttgtttttttttaacattttgtttgtaaataatttcaaccttacagaaagcgtgcatgaatggtagaacacctgtatactttctgtctagattcaccttttttagcactctgccccagttgctttattattttatatgtaccctcatgcttatgctctctcatgtacacactctctctttcttcctctctgtatggcatttcctgaaccatttgagagtaagctgcatatatcatggccctaaacacttcagagtgtatttcatgagaataaaaatattattttatataaccacatcttaacatagttaccaattttagtaaatctaatattgtcctggtacctttatctacttgtcatctgtattctaattttcttggctgaccaaataatgtctttatagcatgtcttttccctttagaacagtatcatttctagggtcatgtattacaattacttgtcatatctttttagtctcctttaaagctgtaacagttcctcaacctttctttgtctttcataaccttaatactttttgagtaatgcatgcccccctccctttcttagcagagttgcttattttaggtttgtgtggtgtttgctcatgattaaattcagattatgcattcttagccaaatttcttggggtgttgcatccagaggcagttattactcatctgcccctcttttgtgctgtttattttgatcacctggtcaaggtgttgtctgctttctctattgcagagttcttgttttttctcttaattctaataaatatgtggggagatattttaagaacatgccagtatcgcttgagcgcaggaggttgaggctgcagtgaactatgatcgcaccactacactccagcctgggattacaggtgtgagccaccaggctcggccaagtgttcttttttatgygtcttttgcttgagcttgttgagcttttgcaatttgcgggtttatcatttttatcaaattagaaaaaatgttgaccattatttctccccattattttttctttcaccaccctcccctcctttgggcactcccattgcatatgtattaggccgtttaaagttgtcccatagctcactgatgtgctgttcatgttttttccagttttttttcctgtctgttttattttagattgtttccgttgctatgtcttaggtttctaattctgctgcagtatctaatctactgataatccaatccagtgtactttcacctcacacattgtattttttacctctagargttaacttttgttctattttgtatcttccatgtgtctagttaacattcagactttcctctagcttcttaaatttcagaatatagttacaataactattttaacatccttctctattaatttgataatctgtgtcatttttagattaactgaaattgattggtttttctccttattatggactatattcattcttctttgcagcctggtagtttttgtattggatgccagacatagtgaattttaatttgttgggtgctatatatttttgtatttctataaatatttgtgagctttggtctgagatgtggtaaagttacttggaaacactttggtccttttggatcttctttctttctttccttccttcttttcttatctttcttttcttttctttcttatgttgcctaggctgatctcaaactcctggcctcaagtaatctgcccacttcagcattccaaagtgctgggattacaggggtgagccactatgcctggccagatccttttgaattcttgcttttaaggtttgttaggtgaaaccagagtaaattttgtcccactactgaagcaaaaccatactaagtacttaatctccataaattatgagattttacactctagcttttgggaatctaaaccattcctggccttgtgttagcccttgcgattgtttcctctaatccttttgggcatcctttccttgacctcgcatagtttacttacatggatacactaatccctactcaactgaatatttgagggggattatttatagatctatcggtttcctatctttaaggatcactgtccttcattttccaatatcccgagaactgctgttcttaggaattttttttttttcttcctgagcacttacatgggcctcaagggctctttgggcattattattgttattttaatagacttttatttttagagcagttttaggttcacaacaatattaaatggaaagtctaagctgggtgcagtagtttacacctgtaatctcaggactttgggaggctgaggtaggtggatctcttgagtccaggagtttgagactgacctgggcaacatggcgaaacactgtcgctacaaaaaattagccaggcctggtagcacatgcctgtggtcccagctgctcaggaggctgagatgggaggattgcttgagcccaggaggtggaggttgcagtgactgacgtatgatcgcactactgcactccagcctggcaacagagaccctgtctcaaaaaaaagaaagtacagagagttcccatttacccccacacccacccacacaaacaacttccaccattatcaacaacctgtacctgggtagtacatttgttaaaatcaatgaacccactatgacatataattaccaaagtccatagtttacgttagggttctgtcttggtgttgacaaatgtatagtgacatatatctaccattatagtatcatacagaatagtttcattggcctaaaaatctgtgatgaatgtgctctgcctgttggaaaccactgattttttttttactgtctccataattttgcctgttttagaaagtcacatagttggaatcatatagtatatagctttttcagactggcttctttaacttagtatatgtatttaagttttctccatgtcttttcactgctttatagttttttttcctttttaacactgaataactatacattacctagatttaccacaatttatccattcacctgctgatagacatcttggctgcttccaagttttggcaattatggacaaagttgctataaatgtctgtgtgcaggttttcatgtgtacataagtttcaaacacatttgggcaaataccaaagagtacaatttctagattgtatagtaagaatatgtttagtcttgtaagaaactgctgaacttctgaagtgtctatgattttgcattcccaccagcagtgaatgagagttcctgttgctccacattcttttcagcatttgatggtgtcagtgttttgttggattttggctattctgatggatatgtattagtatctcattgttttaatttgcagtcccctaatgacatgtaatgtgaagcatcttttcatatgcttatttgctatatgtatctcttctttggtgaagtgtctgttcaactcttttgcccatttttaaaattggattgttcattttcttattggtgagttttaatagttctttgtatatttgggtaagagtcctttaacagataagtcttttgcaaatattttctcccagtctggcttgtcttctcattctctttatcgtatattttttatagtttcttaggtgtttgaggagagagggtaactctactctttgttattcagtcttgactggggatggaaatccttgtaagttgcatttgagaaacttaatggcaatctaattttcttggccttttaagttacttttactgaggatttatttttcccgttttgtttaaagtctaattgttttactaagctatgtctcagagttgatcattccaagtcactttttattggtacccaaggcccctttcaatatttaggttatagtttcttttatttccagaaggttttcttggattgtattttcaagtatttggttccattgctttaattttcttcctcatggacttcacttatgcatatatgttgttccccgctggcctatctttcattcacctactttctctctgatccttttgatttcatttgtatactcctaattctttccatgcttttcattaatgccctttattaaaatttcacttgaatctattctttcttgacaacttgtagttgctttttcatatcctcaaatgcttggctgctaatattcaattcagtttagaccgtaatgttaactgtatcctttagccccatggttgatttttttttttagggggaataattttcatcagctgaaatgcttcgattctcactttatgtcttggcttttgtttttgtttttgagacagggtcttgctctattgcccaggctggagtgcagtggcgtgagcagagctcactgcagccttgacctccgggctcaagcgatcctcctgcctcagccacccragtagctgggactacaggcatgtgccaccatgcctggctaatttttaaattttttatacagatgaggtctcattatgttgcccaggctcgtctcaaaactcctgagctcaaaatatcttcccaccttggcttcccaaagtgccaggatcacaagcatgagccaccgcgcccagctgttgctgtttttttaatagtagtttagattaatatggtctactattttctaattttactgatttgtttttgaacaaggttttcattcaagagcatctcttttattctgccttcctcagtgcagttttttcttctttttttgtgcttttcctctacttatcaagggattctctctccctttcctctcctgcctctcttcttattgtagtaaaaaacataaaatttaccatcttaactgtttttatgtacatagttcagtaatgttaggtatatttatattattgtgaaagagatcttataacttttttattttgcagaagtgaaacttgggctatgtttctttgtatgccttgtgacttattgttgttggtattgttgaggcttgggcatttgaataaatacccagttgttgtctttacagactgcttcgtgcaggggaagaccttcaccaatcagcctagttagagatttcatgacctcccaaacctgttctggagatttgtcttctctggggttatgcatgtgcctttagttgttccctgagccccttgtccctacttcttttcagagcccataatctctttcttcccctggtttcttactgcagctctaacatgccatggtgatcacatctgttttcagtggcttccaaacaaggccttcttcagtcctgtcagccttccgagtcacgcaaaacagaaaatagtccctcagacagcccccacagtacccagaacattggacacatggtcccctcttttttttccatcccaagagaagatctgtggtgtggaagaagccatattatgtcagatagggagaggtgtagatgggaccacaaaacatcacaaattttcctttcccatttactggaaacccttcttggtttcatgctggtctaggtgctatatagtttctcatggaatctctacagttctctcaaaggtgttctggtccgtatattgttgttaactcattgtttctgtgagagtgagaggctgaagtgaagcttcctagttctccatttccagaatgatggtgtggtgttgagggaagggaggaatttataatattgttcagaagagttggcattcttcacagcagtgtctccaaggagtaccaccttttctctatatatctgattcttctccagaagcatggcttctctgaggctgccaagcctcttgcttgtagtcaagtgctgagaactgtcaaaatcatgacccatgttccttatttgacatttaattggagtttttattttggggtttttttatgcttcatctaattcttccatgccccttgatttttttttttttaaccaaatctattaagcctcctctcccttgctttccctactcacaggcttgcagcagtttacaatagtgggagttacacttatttatttaattacaggtcatttgaaaatttttgtaatagcccttgtctcttagtaatgccgaaggtatggctcatatgtattttatttttattctttttattgattctgtggttctttggggaaggtgtgtggtttcaccattttcctgcagacctggaagtcagccccatattacctttcagtatgcgtaaaaagacaactactgtttatattattgtggctcatatccaggagccacaatagagtatgaggttcctaccttatccaggctgtgctgttctctacaggttcttgagcaggccagagtggaaatccccctgtttcccttcagcattgttcagttctcttttaaggccttttcacctgtcctcactgaggagatgaacaaaagggtaagtgaatgggttctgctgaatgatttatttagtgacttattataacctctcatcattaaggaaagtaatacatgctttatttaatttgttgtgtttttctctagatttttactatctgcatattaacatttaaaaatatttttatgaaaatgggaatcagactatgcatactgttttgcaactttattttttcatttaacagtatatcatacatctttctgtatcactacatatcttatttcccttgtttttaatggctacatagtattctgctatatgatatacctattaacatttgtgctttatacatttttgctattacaaataatayttcagtgaacatccttggacatttggcaagtatttatatcaaaaaaatctttggtgaataatcccatgcattgactcatgatttcagttctctttccatattcattcccatactatattctgttgtttttcctacagatgaggatcaagtggacagagatatcaactgtctatgctgggccatttagcaaaaattgcaatctcagggctctgaagaggctgtttaaaagctttggcccagtccagtcaatgacttttgttcttgaaacccgtcaggtaagaccggaaaattcagatttcattttctagattagtgttagacattcaggtgactgcttgggccatgcagatagcaaatattcgtaaagtaagcttgattgctaccaactggagtgtgagacatactctaatgagagcagttgttgacccacaagaatgtatacccagtattgtgagatcttttgttgtgtgtgtttaaagaattgagaaatctggctgggcgcagtggcctatacctgtaatcccagcactttgggagtttgaggagggaggattgcttgagcccaggagttcaagaccagcctgggctcaagcaatgtgggaccacattgctacaaacaatttaaaaacaagaattaagaaatctgtcagttttcatatgttggctcccatttctcaaataccaggccatacgaaaaaatatgtctgctggttgaatataacctgtggtccttatgattgtacctcagctttaaatgataaaatactctttcaaaaagagaagtaactttcatatcttagaaagttacttctttttttacattacagagtaggctcatggcttgcttggttaagatacaggaggaagattatgggagggcttttgttgttattgttatctcttatctcttagggtaagtttttggtattgtaggtttgtatttacataaaagccctttaaagagattagttttactttaacaaaaataatacttgcatatggttttaaaaatttatgtagttcaaaaggacttcacaagttatgtctccatcttcacagtcataacaataccatatcaatagataaagtttatatgtgaagcaataacatcataagcatatagagacatggaagaaatcatgaaaagaaaaatggaaacagtgtaatgtaggatgtttgtagaatgatatacaataaaggtaacaatggaggcctctagggggaagaattaggcagctagctaatgggattaggggaagacttcactgtaaatatattgttcctttagaattcggaactaggtaactattaaactggtgtattacaatgtatgaaagtgaagtaaaaacacttctaaagtgatctaagtgcaggatcctagatattttaaaatggctgtctctaaattttttaatttaatttttattttatttttatttttgagacagaggcccaggctgcagtgcagtggtgccatcttggctcaccacagcctctgcctccccagttcaaatgatttctcatgcctcagcctcccaagtagctgagacgacaggtatgtgcccccacgcctggctaatttttgtatttttagtagagactgggtttcaccatattggccaggctggtcgcgaactcctgacctcaagtgatccacctcccaaagtgctgggattacaggcatgagccactgcacccagcttccaaatcttttattaatggcttttctatgactaaaaataaaaatacaaagattgtccctgagaagatggattgggggatgagaagtgtatagcaagggactataacatcttcctttctcttggcccctttttttggttgcgggggtggcgggtaaaatacatataaaataaaatgtacctttttaaccatttttaagtggcattcagtatgttgatattgtgcagctatcatcaccatccatctctagaactttttcatcatcccgaactgaaatttcctattaagcaataatttcctattacccctccccccagcccctggtaatcattgttttactttctgtctttatgaatttgactactctgtgtacgtacctcacataagtggaatcatacaatatttgtccttttgtgtctggtttatttcatttagcatgtcttcaaggttcattcatgttgtagcatgtattagaatttcattttcaaggcaaaataatattccatttcatgtatataccacattttgtttatccatttgttgatggacatttgggttgtttcttgtttctaccctttgttttgtttgttttttttttttttgagatagggtcttgctcacccaggctggagttcagtggcgtgatcacaactaactacagcctcaacctcctgggctcgagcaatcctcccacctcagcctcctgctgggaccacaggcatgcacgcctggctaattttttgtaagacagggtctctctatgttgcccaggctgatcttgaactcctggactcaagagatccaccyaccttggcctcccaaagttcttggattacaggcgtgagccactgtgcctgaccctgggttgtttctacctttgactatcatgaataatgctgctatgaacatggttgtacacatatctgttcaagtccctgctttcagttcttctgggtgtatacccagaagtggaattgatggatcaaatagtaattctatgtttaattttttgaggaaccattatactgttttccacagtggctataccattttacattcctaccagcaaagaacaaaggttccaacttatctacatcttcactgacacttgktttctattttatttaatagtagccatcctaatggatgtgaaatggtatctcatttgggtttgatttgcgtttccctaatgattagtgatgttgagtgtcgcaggcaatttgtacatcttttacagcaaagtctattcacttgtttgccctttttttcttatttatttttttcagttccagctactctgcagtgtttgcccatttttaaatcaggttgtttggcttttttattgttgaattgtaggatttctctgtacattctggatattaatcttttattagctatgtgattgcaactatttctccattctgtgggttrctttttgacactgctgttagtgtcctttgatatacaaaaggttttaatttttatgaagtctaatttgtctatttttaattttgttgcctgcctttgatgtcatattcaagaaaccattgccaaatccagtgtcatgaaacttttctatgggaaggcttttatctccatattgatgctatggctcagataatcacaaagatttagttactccgagttaacaaacagaaaagcagaccatttgaagatgtagcctatccagtggaagaacttatccttcccaagcttataaagttaagccaaaagacaaatgggaatctctgcccgtgacttgcagtgatgactttagtgatgcataataaatattatgaaaagcctgttgggtagttccattttaaatgacaaagttatttgttgtctgaaagctagtttctgaactttgatgatcccatttaaagttgacagtttacaatcaatacttgtgtagcccagcacagtaaaggcatccattctggtggctttggccactgtagtttgaatcctttccccaaccccttctttagcagtttgagctggaaagcaatgatgaggaaatcttggtctttctgcagcctcatctctgtatacagtatgaagtcctagaagctgcccagctggccatagartccttggatggtattctggtagatggtatctgcatcaaggtagggtgacaagagaaagccccctttgcttgggtctggcctaccacagcctgtatttatagtgycccaggacatataggaaacactctcaagaggcccacgcacaagactttgttatggaaagtcttcagccaagtctaacattctcctactggcagtgattgaagacataacggctttcatttgtgtcagaaatcatcctgggctagatttgggtcttccttgcattctttgttactacttaagtcccctgtggtttattctggttggttctttgtggttacccttttcttcacctttcagggagatcaaatggtggtattttgaagtttcttgtgcacataaacagaatttcattaagggtgggaggcaggaaactgaagagaatatgtttacatgaaaatatgtatttatcaattaagtctctaacataattctgtgaggccattatctttagtttccttttacagaaaagaaaagaaacggaaaattttaggaaactgaaaaatgaagttattagtaatggcaacaacttgctagtatccaataggcctgaggattaaattgattttctaccactaacaccaactttccttggttaggtgcagaggcctgtgacagagctcacgcttgattgtgacaccctcgtgaatgagctggaaggagattctgaaaaccaaggctctatatatctgtctggagtgagtgaaaccttcaaagaacagctattgcaggagccccgcctctttcttggcctggaagctgtgatcttgcctaaagatcttaaaagtggaaagcagaaaaaatactgtttcctgagtaagtctatgctactgaatgtagctttggggaaggaaactggggatggtgataacatgaggtcagagaaaggaagattcacctcctgggctggaccagggcagcagttcctgattctgtccttctcctttgaccctggccaggcagcttggatggtgatcagctttcttggcccttaataacataaggtgggggttcttgctttcagaattcaaaagttttggcagtgcccagcaggccctcaacattctcacaggcaaggactggaagctgaaaggcaggcatgccctaacccccaggcacctccatgcctggctcagaggcttaccacctgaatcaacaaggctcccagggcttcgtgttgtacctcccccctttgaacaggaggccttgcaggtgagtgagtgaaggcgtcttggagaagatgtcaggagagtcctgctcagtgacacttaatcctttaatcttttttttttttctaccctggccctcagtcttatttcactctccagcttcctccagtcctggccacatctccttttctcgcagatctctcatacttttgcccccaccatacctgctaaacttagttttttagtcttccagatctccaagggactttgaaggacaaaggcaggaagtcagagagctggacaattattcagtgatctagtctagggtttcccaaagtgtggtatatacacaagataaattgtggttgtcatagatggtcttttcttttttgttttcacttttatgattatggacttgtccgtctttttattatatctaagacatctgaatggacttgttttgctaatacttgttaaagtatacaataactacattgagcctatgattttgtggatggcattagttagacaaggctaaggaagaaattaactcactttatggaaaaatgttagagggatatacaagcagaagagtggaggtagaaggtaaatggctgaagcttgggaaaccctgtcttagtctaatctctcatacttaacagatgaaaagtaggggctagagttggtaagtcacttgcccaaggtcacaaagagacttaatggcagaagccagactagacccytcatcagcaatgtggctcccctagcttggggtcttggaagacccatgtggaggaaaggacagtagctgtcctcccctgaggaagtccttagccaacttggaggcctggggatgctgggtcagcagagaacctgcagtgtgggctccagtgttagaaaagggatttgtctggaacctttactggaatcccatagccttagaggcagaggaagagtgttgcagcccttccaaaggtaacgagagagtgttctggctgagtatcgacacatggctttgatcccagactctgaaactggaccacccgaagatagcagcctggcgctggagccggaagattggaaagctctacaacagcttgtgcccgggcactctctgcctcatcctgctgccaggaaccaagaggtraggactagaaagggtatcccttcaggactctgtmccctggatttcagctgttcttagagaaaaagccttttgctgatatttaggcacatagtgaggacttacatgaatcatctctttaattttcaccgttctaaaagataggcattgtattcccatttcacatttatatgctcttgtataactacatttattggtccctcaaggagataatttatccccagttaaaaccaggagtcttatgtccttactgctctctggagtaagaagtagctgctaaccccacttgagtaaaaaaagtaaagtctcagaacaagccctaggcttaggtgtaaccactctacatgtgaggaatgtgttcctgccttctgtacccttttccccattgacacctatgttttaagagataacagggcctggtttgctgattctaagcctgaggaatactggagcaggactttgagtctagttgcagctttatcacctatctcctctgacaagtggccaagctacttccccactgtaggtctcaatgtccttttagtaacatgagggatttggaataaatcagttgattttcaaacccttttaactgtaaaccctttctttaaagaaaaactgatattaaatcttaaagcataaagatgggcagttttggaatgagtgagtgggcagctaaatgaatgagtgtatattggggaagggagggaaagatggtggcttttttgaacagtgtgaaaaccttgggttgtgttaatttttaaaagtcccttgagattctgacatctggttaggcgcagtggctcatgcctataatcctagcactttagaaggccaaggtgagcggagcacttgagctcaggagttcaagaccagactaggcaacatgacaagaccctgtctctaccaaaaacacacacacaaaaaaaaaacaaaaaaaaaaacccagccaggtttggtgttgtgtgcctgtggtcccaactacttgggaggctgaggcacgagaatcacttgaacccagggggcagaggttgcagtgagctgagattgcaccactgcactccagcctgggctacagagtaagactyttatctcaaaaaaaaaaaaaaaaaaagattcttacattctaggagttgacagagcatgaatacctctggccttgaaggtggatcagaagaaattcatttcctagcataaagttcttataacatgcatctgaggaccattagggagatggtctacctactgggcacctttgaaagaactgctttctctgaaaagcagaaacaagtattaggtgcttacattgaggggaaaaaaaatcttagaccaacatactttaaacaggcttgtgggtaagctaacaggaacaggttaaaaagtgaccacaagttgccagtaaaagctttttggttaagatgtgggctctggggaacagacagacttgctcctcaggggcagtgtatggtggtaggtggactgggttttcatgttctcacgtagaatacttagattacagtccaccattgtttaggtaaactaagtcaagagtagcccaaatcattgttcttcctggatgttccacagagggtgaagccagaggaggaagtgctggggtcagggagcaaaaacacttaagttgtgactgagacaaaggtcctaagtttgacaagtcagtagaattaagcaccccctggaagcagcaaatcctgtggtgaagaaacctgaactactcctatcctttaaaagtcacattctgatttctgtagacatattgatcaaactcagcagcagtagcatgcatttccccaggctgtggaagcttgctgtgtgactgacttctctgggccttgtttgtgcagttgtgtccgtgatggcagcagatactcttgggaaacgtyggggaaaaaaggaatagcaaaaacaatagaaggtttccttaggctggggtcttgatgcagctcttaatccttacatttttggtagcttcttaaattaatattgaaaacaacagtaatgtattaaacccaggtactgtgctaaatgcttctatatgcatttttggttgaggttgtcagaatctttactgaacaagtggagaaaaagtctcagattaaccaattttcctagggtcacatagctagtaagtgcatagtcaggacttgtaccctgatggtgtgtctgactccagagcaactctcctgccctcaaagctctagttctccatacacaaaagtctagtgtttgcatgtttaagttcatacatcaggtggagacagattctgtgtttgtctttgctcatttctacctgctttgcctcagagagctcctcaacgctgacccagttccatgaataytcattacaaggtggcagggaactaacaagtattgaaggctcctaaattccaagcaccacaccaggttttttacaacaaacattgttaaataagttaatgttttgtaacttttttaaacagcctctggcacctagcaggtgctacaaaagtatggaatgaacaaagactaagactctttaacagcaacttataagggatctaatgacagattgctattattgatatcctggttctgtcacttaacagttgtgtgacttcagcaagtcatataatgtctatgagcttttttattttttaaatgaggataacacttgtacctacatcagtgagcagttttgaggattaaatgagacaagtgcttagaacaactcttggcatgtagtaagtgctcagtgtatgtttgctattgtcgatagtcttcaccaaatccctgtgagatagtaatttaaatatttcatagttttatagatatgcctcatatctcttaattggtaaaggtaggatttgaatctagacctctgagactcatcagtgctttttccattaaaccatcttcagcaggcagctttccataaaccttcctgcccttgccccatggcacacacacatacttggaaaaatatctcctctaactaggcatttataaccattcattcaaccttatggataaaaacatacctttgtttcttatttattgcagcactcatggttcactctctggtctaggactgatgggaataaaagaggaagaagaaagcgctggcccaggcctgtkttcgtgagtcggcctgccatgtttccatgtgccatttcttaccccttgtaggcaatggcaaagaatgtggtcaggctgtagcctccccaaccagcagacagytttatggaaacttggtatagcagctaaaagagtttagtttgtttatatggcatgtataagttttcaataaatgcctaaagttcaagcatagtatggggatgtccacagattgtttctttgtgtcattgagtttatgtgcataggtgcggtacaaggtgctcattccatgtagcacccctattacgtggtatatactgctaaggaaaccaagaggagtgattactcagaaaaccagccgattatgcaatttgtcaaagttgtaatgtctgtgaagcaaatttctttaaactgttttcttattgacaactcttaaaaaattgaaggacaatgatagctgaactgagaaatctggcaagtccaccaggcagtggagtggaagattcttttagtttttttaaccagccctggaaaccccttccattccacgtttaggaatcctccttcccttcagaacatgactgcagtgccacccttcaccagtaggtgcctccatcacaccatctctccctctaggaactggaaacttgaaattcagtaaaagccgttttaatcaactctcaaactgataacaatctgtgttggaaaggacatggggcataggcacccaattccaaaactactagaaatattaactgccctccagaaaagatgaatctggcatacagtatgtatcatacccaaaaacctcgtaaattgctctgtacactgagaccctgcaattctacagcattatcctaggatactaggatagctacacaaaaacatgtaatgaaggagctatcagagggttattacaatggagttctaggtagccagttctaatgtgtgtgtgagagagagtaaataaaatcttcggtgaaagagatcttcaagaagaggcagtagacctctggatccagaatgcttgactttgaatcccagctttttaaattattgtgtgaacttgaataaattgcttaacatttctgtgcttgggataataatggtatgtatccgagaggattacagattagtgagattatacattcacagtactgtatattatttgttgtatgaagtctggagggatacagaatagcatgtagtttgagtacacttttgtaggagaaaatatacaaagctatacataggcttctaacaaaacctgcaaggctatatgccaaaacgttaatagtatttatctatggctagtgccattgacaaatcaggttttaacaaatgcttttctgttgtagactcgattttttttaacattcaacatatattgcttttataattggaaaataattcttaccacctgctgtcaggagaagaaaagaagagaaagataattctacttaaaattaactcttagggttgggcagttggagcagtgtttaatcttataaatgtagcttcataagatctggtcctatatgaaagtttaaatgtagcttctgtaagatctggccctatgtggaaccagaactgaagagcttgacttgggatcagacaccgcaacttgattcaagtcccttcatcaggaggaaagttccctaggtgaattgccaacttccgctgcaaggccctgagaacaacttgaaactgacagtgttgttgggttccttcctgcccagctgagctccaaagctgtgagagcttagctgctgtttacctcttgaggctcaagtcctgagagataaattaagtgtctgcctcggatatgaagaggcctgggttggagcttcacctcccacacacacctgagtattttggggcaagtcacttaacctcatttgaggctatttccacagctgtataaaataaggaaataactattttgattattgagacatttgtggaaaataacacagtaatgcactatgtgtgaattaatttccctctctgggcctgtttcctcacctttaaaataggggaaattagtacttcataaggttatgaggattaaactaggaaaagtcaagattgagtgctgaataaatgacatactattttactagggatcatctccctgtaccaagagcactccacttgctctcaagaatagccaaggccatctttttcttaggaaaaagggtaggggtggaggtttccccagggatccaactccagaactctgcagagatgggcctgcactacaaggcctctgagacttcagtctgcacactctgttctttagcctgatgctccaccttttggaagccaaagctgccaacttggcctcttgcaaaacacacattccattcataagtgcgtttgtgcatttttcctcccacacccttctaggcagccagcgcagagctgccaaggcagctgctggagaagcagcttcttatgggggaaaagcaactccaagggcttttacagaactcatggtttaggctttgaacacattactcccattttctggtctccttgaccatagggggggttgttcatttctttttgcccccctttttgtaaataacctcttccctattaaaaggaaacctattaatgaaaatttgaaaaatacagaaaaatttaaatcacaactgatcccaccatcaacagtcaatgactgccaatattttataatcgatcaactttttccatgatgatagaaattctattattcaaaagcagagttttaatagctgtgtaatattctagcattgatgtatgccataatttctaaaacagtcccttttgttgaccttggaagttgttcccaaatgatgctgccagtgatatccttgcacatacatccttgggagatatttcttttaggaaaagtgcctaagtgaaattattgggttaaagagtacgaacacatgcttttaactccagaaaggattttactgtttactagcatagatttctttcaaatttttgccatttaaaatttttcattgtatatttaatgtctgcttatttgaataccctttagattggcatcctgctttttttcccagaagctttttggtaaattatttttcctaagtgagttgttcatatcctttgccatttttctattgggaagccagatccttttccatactgaatttttaagagcgccttatggattcactatatatagtgtccatttacaaactattacaaaattttagtttgctttttaaggtatatcattttatgtttagtcttttgtgatttcctctatttgcttttatgcttagaaagccctgactgatctctggatccaatgacaagtttatatatttctaatgatttaatgtctatacttcatagccttatttttcttggaatttatcttggcatgtaataactttctcccaaatatttagataattttacccaattatctagctttacttacccaataaaggaggatgctcctttatcatttaagtccatgtgtatactagggccagtattcatgttttcttctgtcttgtcatgtagtagtaccacactattgtgtagctctatgatgtactagcagttttagcagcatcaccccagataaacacagggcccatggagagtctccatcagcatggattacagaacactgtagagttaagatgcttcgctgctgactgcactggtgctgctacattccaccaggactttttcagcacccctgagtcaagagacgggacaagggtcagaacactgaacagaagaatgttaaactcaggtaggagccttatgtttttaagacagggcatcctcacaagtcaacgtaaaggaaaggaaatggagaggttaggcaagctccctaatcttatcaggcagactaaccctttttgacctacgtcaaaactcagagctagaaggatgacttccagagccaatccagccatgtgcttcagcaactgatttgaaaggagggaagaagccagtgttgcaactcttccgtactcctcagatcctcagcactaccttcagtgcacctttcttgctagaaagcattccacgtgcagttaagctcatctggtaactaagtgaagttgtttgtccatcatctaattgaaaattagattttagctgtatataatctatacagcctgtgacagcactttgaatagcccaggctctatacaagcccccaaatcagtatccttccactttattccccaaacctatttgtaaggctctggctgggctccataactcagaagtgccaaagcacagaagaaacaagcccaaaagagccaactggggaatgttttagaggcatactttttaagtgaggaaaacatcatcccttaagatttccttcctgcccccacctggtcctgtccttagtaatgaggaagagaaaaagagttgcagttcattgaggaaatctcagaaacctctccctaatcagagaatgtagacatgacttccagagcctttgcaacagaaaagaaaaagtacacctactcccaccaccatacttacttatttttacaagataccaacatgaggctgggaatctttggggaggccatcagggtctccatgaaagaaatgtgtaagatggccagtcaagagctttcctgaatgtaaacaataactagacagaaaatacaatggaaggaagctaagggtcgtaagtggtctaatcatcatacatctagagtgttaagaggcagatgggaatcccagggatcacgttagtctgagcttcttcccccatccccaatttggcacagagggaaattaagcccctaagaggggctgtgacttgtgaaaggtcatgtatgaccatgccaaccccctctcttattctctggtttccctgcattactcacctagcattcctttggagaaccttaaaagagcttgtaatgtttgagcacttatgtgtcattgggactttatcaagacttttaaatcctagcactctgatggaaccaagagtcttttaattttgcagatgagtaaaaggaaacttagaggttcactaacttgccgaaggtcacatagcagtggcatttgacagttaaagccagatacagcttgtttcctttgccttaatgcactgccatactgttaaatctaggggtcatgcatttaacatactgctcaacttcactttttattcctcatgagaattcacatcagttgcaaaggtaagactatttaggcagtggccctgtgaagacttatttgctctttgcctctaagcactgagacccccaaaagccaccctactaagcttggtatgtgggaggtcaacacccatgtttggagtctgaggatcctgtacttatctggattgtttttcaaagaataaaaattgttactcaatatcatgttggtagaagctcccagtgggtaaattttgccccagaataaagtcactgtttttttttttttgtagaaatatcaatattcaagtaaacaaatttattaaatccaacagcaggtaaccttccaaataaaaaacattaaaggaaaaaatgtagacatcaaagacaaaaatgtgtgtaacaagtcaataaaaatactcaaggggccatttggagagtgcaacagtgcagaaaatacaaacaaaagtattaacttttgtcaagtttgtacaacctcaacaaacagacacactggtcayaaaccaagagggatccacaaaggtggagggtcacatgagcagtggactcatcacctcagcggcttaaggcagggtatatctgtgggaccaattcatcyaagccccatgtgcctattgcttcacattccccctttaaaacctagtcatattcattagtgcaacaggtaagagcaattaagcacagacggagctggggaccagggtcagagggaagacacttctcccagagcaaatgtatgcatgtcagggggatgaaaaaccccagcagctgctgaatggcttcctttggcaatatccaagatttgtgttgaaaggagcagggaggttggatgggtggcggaagtaggtatttatgagataggctgggtttccaagaagagaagaatagggaggacatgatgcccagcacctgaatcagaagcagaacccaatggttatgcaaagctatttgaactattttggcttctgcaaccagtgctcaagaatctatttcatctttcgaaaagggggaaaacccctgccgatcct

SEQ ID NO: 95757 - DNA, 36634 bp, Homo sapiens
  misc_feature (1)...(36634): n = A,T,C or G
gaaatattatttctttactagtcacacagatgtgcccaggacagtggtagagcccacagggttacataaatcataatggtagccctcaagaacttcataaactgtatatggtattttaaaaagttgcatattgtctgtttccacctactagaacataagctctagaagggcagagactatgttttgttcaccactgtttctccagtgtctagacgtagattctttgaatgcatttaattggagccttgagatatgaagaagtaggatgcggttacttcatgcagagcaagagtagcatgcacccagagaaggccaggtggaactcagcatgagtgtgaaggcctcatgtcaagccatgtcaggggacacaaagatggagtattctctaacctatgtgacactcggcataagggaagtacaagcactcaatatgtgagtttcattcccacagtctgtggtctttagcccagtctttccagatgcctattgagttcttcaagcatccaaatggtttggggaaaggcttcaggttctaaatgagaggctttgtgggttaccagctggagagtcagaaaatctggatttgaattcactcagccatgaaataattgtgtgatcttgggccgggcacggtggctcacgcttgtaatcccagcactttgggaggccaaggaaggtgaatcactagaggtcaggagtttgagaccagcctggccaacatggtgaaaccccgtcttttttttttttttttttttttttttgagacaaagtctcgctctgttgccaggctggagtgcagtggcacaatctcggctcactgcaacctccgcctccctggttcaagtgattcccctgcctcagcctcccgagtagctgggactacaggcgtgcaccaccacgctaatttttttgtattttagtagagatggagtttcaccatgttggccaggatagtcttgaactcctgacctcgtgatctgcctgcctcggcctcccgagaaaccaagtctttactaaaaaatatcaaaattagccaggtgtgatggacctgtagtcccatctacttgggaggctgaggcaggagaattgcttgaacctgggaggtggaggttgcagtaagctgagatggtgccactgcactccagcctgggggacagagcaagactctctctcagaaaaaaaaaaaaaaaaagtttgatcttggggagttctaaggcccactagcctcatctgtagaatggaagcaatagtactactttgcagagctgacttcaggaccaagagatctaatgtctatgaagcggggtacttccttctatttgtcaggatgggggaggctagtcctgtgatgactgggaatgaagggtaaaagagacagaggttgggtaaactccaggctctgtgttcatagcctgctcccagacattctcttgttatctctctgtttcctagcctacacacgtgcacagacacgtagctgctgttcaggaactgagctaatggttttaaagtctgttccttatctttgctggaggcaggcagtagctgtgcagtgacagtgtgcctatgcagacagagggagcagtgaatagcaatagggtgtttccaccatggtcttcactcaggccccggctgaaatcatgggccacctccagatacgcagcctcctggcccggcagtgcctggcagagtttctgggtgtgtttgtactcatggtaggtaggatcactgcgggaaggaaagaagggggttgggcaaaagttcctggctccttctgttgtccttatctctttctcttggtgtcccccttcctctcaactccctatcacttttcgtttttatcctctcgtctctcctaatctcctttcctctcctacttcatcatttttattcttgtcattttaattctttctttaataacaagtgtatcatagttcttgaaacataatttttctctcttcagtttcccatttttatgaaagaccattttcatggtaagaccaatgtgctttattatacttggcctgatgattgtataaagtgcagcaagaataattatttttcacataggcttttaaaattggctttgatggaactcttccatagaaagaatcttagataagactttttaaagctgagccctgccatgggtttgtaccctcaaatgcctatgagttgggtaaattcttttcttttttcccacattctttccctttcttcttcctccactttccccatytcttttcccttccctccttctgcttttctccttcccttgcttgtcttctgtgctcattcatctccttggctgctcccctggccttcccaacctttctccctgttggtctcctgggctccctgttcctcatctctcctcttctcagcagctcctcacccaaggagctgtggcccaggctgtcaccagtggagaaaccaaaggcaacttcttcaccatgtttctggctggctctctggccgttacgatagccatctacgtgggtggtaacgtctcaggtgaggagggtggggtctggtcatcagagcacgtgggatgtgcatgccagtttgtctgtctggtgatggtggaaacgcaaatccttctgtgactcgtggacattatccccttgaacagtgccccagactgaaataagcctttggccccaccagcccctcctctttctgtatctctccatcctgcttcctcacactaatgcttggctcacctagacagaaatcaatggcagggcacgaagggcagctgctatcctcttgtatcccccaccygaagtcctctgggggctcatctccactcaggacctctcctgtttgtaccccagatacacactgcatcggtgtgcttgggtggagccttgagacatagtgtgttgctgtggaaaaagcagacagacctaggttccaactttggattcacagtgtcttcttcttctttttttttttttttttttctttttttttgagatggagtttcactctgttgcccaggctggagagcagtggtgtgatgtctgttcactgcaacctctgcccctgggttcacgcrattctcctgcctcagcatcccgaatagctgattttacaggcacctgctaccacgcctggctaatatttgtgtttttagtggaaacggggtttcaccatgttggccaggctggtctggaattcctgacctcaagtgatccactgcctcggcctcccaaagtgctgggattacaggcgtgagccactgtgcctggcccacagtgtgactttgctaagtcacttaacatctgtaacatctggagcctcaatttcctaagctgtgtgatgagaattacactatctgccttaagagctataggaaggagcagtagtgttgtctggtgacaatgcctggcagtgacacttaatagatgctctttttctttccttgatacttgaaggggcccacctgaatccagccttctccctggccatgtgcatcgttggacgcctcccctgggtcaagctccccatttacatcttggtgcagttgctgtctgctttctgtgcttcgggagccacctatgttctctacyayggtgacagagggaacagagggagctgtgccttgagagcacctgtgggtgggcaggggtgcctcagaatggttttggatgaatgagcaaagagggaaatcctgggtgttcccttcctccacagatgccctacagaactatacaggtgggaacctgacagtgactggccccaaggagacagcctccatttttgccacctatcctgccccctatctgtccctgaacaatggcttcctggatcaggtaagtgtgagggggagacctggggacactactttggtcctgttcctcggcaccccagcctattgttcagtctctgggtggagtgtgggttgggtctatcttggcactccccaccatccccaactgcctgtgttgcacaaagccagatgacatggaatatttggatgagagagggcagatggagcacctggcagctgacagggaaccctctgcctctgttgactccaaggttctgggcacygggatgctgattgtggggctcttggccatcctggacagacggaacaagggagtccctgcgggtctggagcctgtggtggtggggatgctgatcctggccctcgggttatccatgggtgccaactgcgggattccactcaaccctgcccgggacctgggcccacgtctcttcacctacgtggctggctggggtcctgaagtcttcaggtgggagacagactctcctggtgctggcctccactcaccttcctctgctaagggctctgtccctgggtccacagcactctgcctttaaaatagctctcttggcttcttaggacagtgttctttctccaagtcatattctccccctttctcccttgcttccctcccaacttttcactgaaacagtaagatttagaggttgtgttcttaggcatgccacattacttccatgcacattagtgacttcatcagcaaaattaatatattcagataattccctaaggcaagaggctggaccaagctctcctggggttccctcttctaaatactatgctttggtgacaaggcaatcctcttcctggtgtctaccaccctgggaacaactttagggcactctcttgttactgccccccgtccttggagaggggaaggctaagggagtcactcctgataccttcccactgtccttcttttgcagtgctggtaatggctggtggtgggtgcctgtggtggcccctctggtgggggccaccgttggcacagccacttaccagctgttggtggctctgcaccaccctgagggcccagagccagctcaggatctggtgtctgctcaacacaaagcctcagagttggaaactcctgcctcagctcagatgctggagtgtaagctatgattaggacaaccctcacttcactcatggaccctggagccagccactgaccccgcctgggaacaacagtcattcttcctctttgttaatgtgccagaacctgggaggcttctctgtttatctgtttggcatcccttcctcctaaactaagaaggatcctggacagggagaagtggaggaggataaggtaccaggactcaggcttctcatcccctcctcccgcaaagcggttttctgaccctcagggcctctcggaatgtagttgctcgaggtaaccgctagagggtgcgcacctggatgctggatggggacggctgcgggcatctgcagggtggagggggccaccatccagtgtagggcacaaccctggggactgccctccatagcctgtcccgactgccgactcctagctctcatcgcctcggcgcctcccaccttcaccctctcggggatgcctccccaagagggtagttaggggtggggaagccgcctccacccagggggcgtggtgggggcggagggaaggagggcggcggggcacagagacagagagcaaggctgtgaaactgaggcaccgttcctagacatctcggtgctgtgtcgttcattcaaggagagttgagatacagtgaaatgagccagggcgaggagggagggtgaaggaacggagggcgggcggctccgaggagcgagagtcgggctgagggcaacctggcgccagggaaaattctggttattcaccacttctacagctctcctgccgctccctgcagaggatgctcgttttgcagagaaggcagtgttcctctattcccttcttccgaattaaaaataccccctcagagcgatctagcctcccgaattgttttttcttttaagatgcggatggacgtacgtgtgggggcatcccagcccagccacgccgaggctcggaagggctaagaccctcccactgccccgcacaaagatggctgctccctcctccccgctccttctcccctccccaaaaccccctcccgccccccggcccccgccgccggctccgtcacttccgccccgccgtggccgaaactgacacaaagtagcgggccgaggccccgggggagcggggccgcagctgggggggcgggagcccgtggggagccgagccgagcgccccccgccccagcccccggcatgggcagtacggggccgccggggcgggcgccgagcgctgagcgctgaggtgaggcgaggcgaggcgaagcgggggcgcccgggagcgcggggccaggagggcagagggagatgcggccgcagccgcggggctggaggggccggggagcgggtgtagactggggagcaccgggggccaagatttgggagctgcggccagacggggcggggatggcggccgactggagacgaggggctgtcgggtkcccggggacggggcagagcgggggtctgcgtacaggatgggaggatggggtgccgaaggggcgcgtggagagcaggagagcggcgcgagtgccaaggagaagctcgtgcagccttggccaggggagacccgcccagagagttgttgggcgagaggagtaaccgggacccgagggtttggtgcctggagaagggagtttgggctggtaggctttgtctcagtaaggtggaggtctatgcctgaggaaaactgagggtgtcaggaaggggcagtagctctgggagatgatagctgtgccgggagccctgagttctgtccttggtgagggaaggtggcccgagctcgtgttggtggccagtgagctggaggtctcgagttccatttcctcctgtttccctgacctgccatcctcctctgaaagaagtggccagcctttggggctcttgcttgtaagggagcagggaccggacctataggaggagctgttttcctccatggagcattgcctgcttgccggggctggctatttttatcccaaatgtggccgagagggggctggggctgggtgacggggcagggcaacgtggctgatgggcctgacctgctcagaaaacccaggctgtgtgagactaagaaggaaaagtgagaggggatcccagttcccaggtctctcctctcttccccttggaatgatggcccccccagaggggatgaggtctggggccaagcctgcttccagtctccccagggtctcagaggtagaacaactttcctggtccatatccagactcctgactcctgatggcgtgtgcagctcctacattaactctttcatgggactcaaactcagatgtttaggctgatagtgtttcttgatcccttcctccccaagggcggggctgcctgtagaacttgtgatgcccactcttgcatcctttaacctctccctgtgctccccaccctcccgtgactcatactcagactgggtggagaccctggctgggggccctggaggagggcttggcatctctaaaatatggatgaggtttttcttcctgagccaggcaccctggactgccatagttggagaaggtcagggatgaaaaggacttctggctttcaggattgcctgacttggtgtaagggcgggatctgagctagcgaagggagaactggtgtgggtgactgggttgtggccagaatctgtaattatagagcttagccagacaggcaattagtatctcttggggctgacaggttggtggggtgtgcctggtaggctaaaggcagagggaaccaaagaggatgaggaggtgaaaggccttccacccagacaaggaaagaggaggtgactgactggcagtttcctttgggccaggctggggagtaaggatgaggctctgccttgtaaggccaggccttgaaccttttaggagaaaggacatgggaaggcggaagcaggcagaggcttgtctcactggtgctccctaagcctgcaccctgtgccatactgactggactaggcttggggtgggagggagggaggggcaaactccccaccagggttgggaagacccctctgccagcccagaagggtggctgacccaggctgaggggaagctgtttagggactgtctgtgcagaaagtgagggccatgcctctaatgtgagctcccctggaggaggtgataatggaagccctagtaatggggggtggggatggcagggaacttataagcctttcgagaagggtggagcctgcccaccctgtttcctgatgccctgccaggtgtttcctggctcatgttccctccaccccaccctttggggaaactgctttctagtaagcacaagcactactcattgccgccagaacacatgagagcctccattgtccctgggatggataccttgagagctgttccccttttttcaatatctggcctcttctcctttccctacaggcatgggcttctgtaaagtctcagccccccatgtcacccaaggcaggggcatgatgggaggtggtggggaagtcccctctttcccaggaacccatcatggcagtaagaggagagactgggagaaggaggctgggggaggggcagggtcagagctggagaagagggtcttcaaaagaggtctcatgaggggagggaagggttatcctcagcttcctgacctcattcrtctgtcacttcttgcagggtctcccatgggattgctgggatcttgctgggtgagatggcagtgtgygcaaaaaagcgccccccaggtaagacaggcaaggaggggagatcccgggaaccatcaagagtgggtgttgttatggctcagggagcaaaaggaaaagggacaactggtatgggtctgagggagggtagcttacagcagcccctacccagcttgggggcagcctaggaaaccgaattcttccgcttgatcccaaarctgggttatctgccaggacagcgcagagcaccagccccacgccccgaaacacctgcagtcttatcttcgggcacctgcagctcctgctttctggcctagggagctgtgttctcatctctgcttggtcctctcaccccttccctgctcccctcgtttttccatctaccggttctcctggtttttccgcgggcgggggtgtgtgtgtgtgaaagcggttgcccccgacaacgccggcagtccgctcacccgcattggcccggcccgggggtgggaggggaggcggggctcgcgcgcgagctttcgcctacgcggcgcgctggcaggctgcggctcctgcagtcggggagcgggcgggggcggaaccctgggcgtgctcggcgtgtccggggccactcagcgcacgctggcatccgccggggggmatggggggcggcggcggcggcgcagctgagctcgcggtgtccccgagcgccggcggccgggaggatggcctgggctgcgggtggggcgcgcgcccgacggctggggctcccctctgagcggctgcggctcctgcacctccccggggagccgccccgtcgatgccactaaggccaaggacatatagacggtctgccctcccccactcaaaccgggatcatgacggtccccaaggagatgcccgagaagtgggcccgggcccaggcgcctccctcttggagccgaaagaagccctcttgggggacaggtaacgggaggcagcgcctggcagctctcccgcacccattatttcccccctccaatccctacattcacttgtccccagcctccccctacctgccttgatcctctttccagacccagagatcctggctccgaaggatccagtccctaccttcttcgtttgcatggtctttggtgattgcgcaggggacttggcccaagagagcccctctagggaagtttatgggagtgaagtggcttggtaggcagggggcactgtggcctgggttttgttactgcagtgtgctctgcaggggtcctggggtgtgtagaaagggttctggaatgctgtctttggctcccggacaggcttaaggcattaggtttgctgcctaaccaagttacccctttttgcagcatgaggtcatggtgacccccggggagacgggctggggaatctattataggacagctccttgttctgggacatgaatttgatgcctgcagtcccagacctgcagaggtttcagataggtttagctagataggtgtcactaactgagtgacagatgagccctttaaagctaaatgtgtgcagatggtacaaggaaggtccagttagagagcaactgtttcaattacatttcattcctccctcctctatctctatctcagtctgcatgacccatatccctgaaacgcaccccccacacctttttctacttgaagatgagctttgaaataaggtgatgtcatttcgggccagtcagaagcagttgctggtgacatgtgacaaccagaggctcctgtaggggggactgcacatggggctgggatgctcccgcagagcagctccagggcacagggagcctccttcttgccacctaccccactctctaaataagggagagagcagtaccgcgactagatctgcagtggtccccagggggaaggaagctttgcgttttcagcgctactccttgattatgacaatgtatgcattagtaatagcagcaaaaggggctggggaatcccaggactgtcagtggctcagattcctctggagtgggggtgggggagacaaactgggtgcttccagtggaagaccttgaagtttggtggtgaggaaaagagaacatgtcctgtcctgtgaatgtaacctggagagccgtgtggtcaggctgctggtgagaggtggactggagggaagaatttgatgaccccctcagttgtggagctaactccttaaaatgatattctgtggaaaaaaacagggaaccccccagcaaagtgttggtcyagacctcagtttgctcctcctgactgcagcatcattttgttgcagaagaagaaaggagggcgcgggctaatgaccgagaatacaatgagaaattccagtatgcggtaagcgactctagaccacctgttccctctctctgtttggagaggggaatggggcaaggacaacctaccgttgggactgagggctgcctgggaagagtgcttgggggaggggaagcaacctcctcagccactctccatctgctatcgtgctgaatttttcatgccttcacctgtcagtgaagcagaatacattgacccccttgagactcccttctctcctcctctttccccctcccacacctgtgtttgctagcttttggggtagaggtctggggaagtataaagatgggggaggcagcctcagtctggttctsggttgggactggagactgctcattatcttctctcctactgccatagagtaactgcatcaagacctccaagtacaatattctcaccttcctgcctgtcaacctctttgagcagttccaggaagttgccaacacttacttcctgttcctcctcattctgcaggtaggtgacccatagtagattttttgcagytccccaaactgaataaagccaaggaagaggaaagggaatgaaggcatcagatggggcctcagaggcatacttctctttctttttttcagttgatcccccagatctcttccctgtcctggttcaccaccattgtgcctttggttcttgtcctcaccatcacagctgttaaagatgccactgatgactatgtgagtggttttcattcttctattttgtcccagtcacccacccctactcccagccccacccccatctcatggccaccttcatycagcacaatttcttggtgaccttgacatcccttacccggtccagctagatccatgatgtctttttgctgagcgtggggagagggaatcagggagtgaactggtttgtgatggggtgtgtatgaggcgttaaccagcatgctctgagttctactgatcaacgaattccttcgaggcgggggaaggtgtcttacctttcagttttcttcttttcagttccgccacaagagcgataaccaggtgaataaccgccagtctcrggtgctgatcaayggaatgtgagtgcctgttggagacaagagctctggggacgaagggggtcccttaggaacctctttagctcctgacagcctcttcactgtcttctcgttgcctcagcctccagcaggagcagtggatgaatgtctgtgttggtgatattatcaagctagaaaataaccagtttgtggcggtaagggacagggtacccctctaggcctgtaggttcttcctcttctttgtgagaaaaggatgaatctttcctgatttactgttgcctcttaaacacccgtggcaggaatctttctcacaccaggggcttctgtgtcatgctgatatgcctggaactagccatttatgcacctggaactaagcaaaccaagaatgcttagtggaaggagccaccattacagcccactgggggtggaggtttgcatatttggacttctcattagtttttctctctaggcggatctcctcctcctttccagcagtgagccccatgggctgtgttacatagagacagcagaacttgatgggtaagtggcatgctcagtgtcagccctctccttctgtctctttggaggtaaaaagattgtctttgaatgaggttctcaggcctgggctctgtctgaatttggaaaaattaggggtaagaaaggctttggatgggatgtgtgaagtgttattcaaccagtatttgctgggctgagcagttatgcaccatgcttaggtgtcaccaggtagaatttagaggatggggagaggtgggcatggtgactcactcctgtaaatcccagcactttgggaggccagtgtgggaggattgcttgaggccaggagtttgagaccagcctgggcaagatggtgagacttcatctctataaaacaaacaaacaaaaaatttaaaaagtttaaaacttagctgggtatggtggttttaatgcctataatcccagccacttgggaggctgaggcgggaggattgtttgagcccaggagttcgaggctttagtgagctatgattgtgcgactgcactccagcctgggcagcagagcgagaccccatctgtgaaaaaaaacatttagaggatgaggagggagcggggactcagagatactgtccttccagcgagaccaacatgaaagtacgtcaggcgattccagtcacctcagaattgggagacatcagtaagcttgccaagtttgacggtgagtaattttggagsagcagcctgaaggtagaggagtggggttgggttttgtttgggggcgttaaattatacattttcctttgggctttttgttgttattatgcaactccctggactgttttggggaggggagtgtttgtaatgtcatgtggctccctcttggttttgagtttataattatttcaaggggactttgtggctgatagctccccacttgctatgcatgttgagagaaattcagcttattcttttagcttattagctcagaataataatatgtgttccttataagacaaaccatacagagtgtataagaaaaagtgaatagaggtcggtaccatggctcacgcctgtaatcccagcactttgggaggccgaggtgggcggattgcctgaggccaggagttcgagaccagtctggtcaacatggtgaaaccctgtctctattaaaaatacaaaaattattagctgggcgtggtgctgcatgcctgtaatcccagctattcaggaagctgaggcaggtgaatcccttgaacctgggaggcggaggttgcagggaggcggaggttgcagtgagctaagatcgtgccactgcactccagcctgggtgacaagagcgaaactctgtctcaaaaagaaaaaaaaaatacaaaaattagccgggcgtcgtggtgtgcatctgtagtcccagctacttgagaggctgaggcatgagagttgcttgaacctgggaggtggaggttgcagtgagccgagatcgggccactgcactccagcgtgggcaacacagtgagacactgtctcaaaaaaaaaaaagaagaagaaaatagctcttccttcctcttctaccctgctgaagtagccacattaattgacagtcagtgtgtgctcatccacacttttcatacatgtttgtacaaacaaatattaggtcatgctgcagctttttttttttttttttaaatactcctgcccaggttggagtgtagtggtgcgatctcggctcactgcatcctctacctcccaggttcaagcgatcctcgtgcctcagcctcccgattagctagaattacaggctcccaccaccacacccggctaatttttgtatttttagtagagacagggtttcaccatgttggccaggctggtctcaaactcctgacctcagctgatccacccgccttagcctcccaaagtgctgggattacaggcatgagctgccgcgcccggcctgcttcattattttcctgaagagttgcatcagctcacactcctcccagcagcatatggatgggcccttgcccttgcatcctcttcgctcagctcattttctctttgttttattgtcttgtggttaggctgtagactggaccttaagcagtggaattcttgtctcctgttcaggtgaagtgatctgtgaacctcccaacaacaaactggacaaattcagcggaaccctstactggaaggaaaataagttccctctgagcaaccagaacatgctgctgcggggctgtgtgctgcgaaacaccgagtggtgcttcgggctggtcatctttgcaggtgagcctcctagcatccaaagaaagaagggtaagagtgactcagccagccctcactcaggagtatgggatgaggtgggagaatacctaaggtaaaaaacctccagctgtgtatacaggcttcttatctagccagtatctctattccaccctggtgtcctgcagtctggggatcagggcagaagcccagaggcagatgtgttatttggctttcccagcccttcccattcttttccaggtcccgacactaagctgatgcaaaacagcggcagaacaaagttcaaaagaacgagtatcgatcgcctaatgaataccctggtgctctgggtgaggcgccccacatctggctccctgcccctgccctctcttctccttgggtgctccttttcctttcctctttcttctttggtcagtagacttcaggtttggctttaaagctgctagcaggtcagctacacaaaggcagtgtttattttaggctccttttagttggaagatgttatttaaaaaaacttcaggaacgtgcatgaatcaacaacttaaagctaaaacaaatcatcccttctctgattccagttatgatgatgactttgtgaagcatgtgaccttctgtttgcttttgccagggacaaggaggccttcatggggatggagagggaattaaaagaaaaatttccatttggaagaggttggcagggtcttttccccccaacttctaagaacgaaggatcccaaaggaaaagtttctgtttaagtttttggcagttcctgaatccttctcttgtttagctagaaatctgaactccttgttgggctctcctccccttcctgtgccccgactgtctgctgcctgcccgccacatgccagcttgtgaaggctggggctagcytctggtgagcttgtttccgccctggctttaaagrgtgtgcggaaacccagcctggtgggcgaggttgtctatcacataagggctccagtcgccccctggtggccattgggcaccaatctcctattttgtttcaaagcctaaacagcggaggcagctttggaaatagatgtaggaaattggacagtggcctggttttttaccagtctctccagagactccaaaatttataagatttttgactaatcaggaaatctagaccaggagtggtggctcacacctgtaatcccagcactttgggagaccaaggtgggaggatcatttgagcctaggagttcgaaaacagcctggacaccatagtgagaccctgtctttacaaaaaactgaaaaattagccaggtttggtggcatgcacctgtggtcccagttactctggaggctgaggcggggggattgcttggcctgggagattgaggctgcgttgagctaggatcatgccactgcactccagcctgggcaacaaagcaagaccctgtttcaaaaaagaaatctacgtttatgaagataagtttgtttcccaagtttaaaaaaaaaaaaggcaatcttagccaggtgcagtggctcacgcctgtaatcccagcactttgggagaccgaggtgggtggatcacgaggtcaagagatcaagaccatcctgaccaacatggtgaaaccccatctctactaaaaatacaaaaaaatagctgggcgtggtggcgggcacctgtagtcccagctacttgggaggttgaggcaggaaaatggcgtgaacccgggaggtggagcttgcagcagtgagccgaggtcgcgccactgcactccagcctgggcgacagagcaagrctccatctcaaaaaaaaaaaaaaaaggccatctatgtgagatagtgaacattaccgtggcttggcatttttgttggcttgtacctagcccaggtgaatagattatttacagtaagttttctggtatgttaaamgtagctcatccccactcttaccaactttgaggactctgraaggtttcaaggtgccagattgagagctaatcaactatttcagtttcttcatcatatagatgaaataatggtcagacagaaggccacatgataattggtgacagactagaacctgtcaccagttctgagctttttccactagagcagtggtgtccaatattttggcatccctgggccacattggaagaagaattgtcttgggccacacataaaatacactaacattaacaatagctgataagcttagaaaaaaaaaaattgcaaaaaaaatctcataaatttttttttttttttttgagacggagtctcactctgtcactaggctggagtgtagtgcaatggcattatctcggctcactgcaacctctgcctctcgggttcacgtgattctcctgcctcagcctccctagtagctgggattacaggtgcccgccrccacacccggctaatttttttgtatttttagtagagatgagagatggggtttcaccatgttggccagactggtctcgaactcctgacctcrtgatctgcccgccttggcctcccaaagtgctgggattataggtgtgagtcactgcacctggccttttttttttttttttgagacaggttcttgctctgttgcccaggctgggatgcagtggcatgatcttggctcactgcaatgtctgcctcccgggttcaagcaattctcatgccttggactcctgagtagctgagactacaggcaagtgccatcaggactggctaattttttaaatgtttttagtagagacggggtttcaccrtgttggccaggctggtctcaaactcctgacctcaggtgatccatccgcctcaacctcccaaaatgctgggattacaggcttgagccactgcgcccagcccataatagttttttttttttttataattatttttcatttaacattcagctgttaccaaaatctcatagtgttttaagaaagtttatgaatctgtgttgggccacatgtggcccagagaccatgggttggacaagcttgcactagagcatctgagcttttgagggctcaagggatgaatacatcacagatgcacttggttttgagggcttcctacatgtcagcctcrcctgtgcttctcattcctccccagatttttggattcctggtttgcatgggggtgatcctggccattggcaatgccatctgggagcacgaggtggggatgcgtttccaggtctacctgccgtgggatgaggcagtggacagtgccttcttctctggcttcctctccttctggtcctacatcatcatcctcaacaccgttgtgcccatttcactctatgtcaggtatgtgccttctctgacctggggtctstccagggagtcaggcggtcccatagaacttttcttttctatgaagatgaagtccttgagaagtaacgagaagtcctcttcttcctgtactgtaaacatttgatgttatctgtttatctttgtgggcagagcaaactttttaccacagtttcctggtacttgggactgtattagagaaaaaaaaaatattgatttattcagcacctatttattacatgcctactgtgtacaaagaagtgtgctaggtgccatcacaaataaaagatgaattaggaatggatctccttccttctaggagcttacgtctagtaaaggaaggaaaatctaaacacattataaaacaaaataggaaccagtgctgtagaattcgacctagagtcttctatgtgaagcttggggatacagagatgtataaggtggcctctgcctttagcagcagcagatggatmggtcgaggaggggagatctggacagtgtcagactgagataccatgtgggaggcacagggtgcccggggactgggagagtgtcgctccctaagcaggtaggcagagagggagagatggcatttgctctgggctttgagtggtgactgggctggatgaaggtggagccacaatggagaggaggmtgagagggctggaagcaaaggtgtggagatgggagcctgggaatggcctatggaaatagttggccagggtcttgggccaagagcaagagctggaaacatagcttgctcctgattgtggaggcttttgaatatttgcctgtggactttgtatttactaaccattaaaagttattgaaaagactgggcacggtggctcacacctgtaatcccagcactttgggaagccaaggtgggcggataacgaggtcaggaattcgagaccagcctggccaacatgttgaaaccccgtctctactaaaaatacaaaaaytagccaggtgtggtggtggttgcctgtaatcccagctacttgggaggctaaggtaggagaatcgcttgaaaccggaaggtggaggtagcagtgagccaagatcacgccactgcactctagcctgggcaacgagcgaaactgtgtctcaaaaaacaaygaaacaaacaaacaaacaaaaaagtttttgaagaaagtcaaaagaatgtattctgtattctaaaaatgcattctaagtgttacagctcttttagaatttgtctagcaggttttccagttttcmctggaacccctcccccacaaaaagaaaaaaatgcattctaaaaaaaaactaaagaatgctttaggaagtattgactggcagtagtgtacagcatgaataggatcaaggcaacatgtaggatgtttgaggtaaagagaatgttagcagggacaggccagtgagaatgaaggggaggatcggaggaagacgaggcaggaggaatggccaggggaaaggaactttcttgcttagtgccttgcacttgagataagggaacctgtgacatttttaaggaaatgttttatggaggtgctgaaaacttgtcctgtctcccatcttttgttcatacagattccccaaatagccctcaactctctcccagcccccaatcttactgctggtgataataaatagaagatacagcatttctgtgctgagagaatatagttwaggcttttccagggtgtgaagaggagagttgggaggttctgggtttagtcctgcctcctcactggccatgtgacctcaggaaaatccacggtcactcagggcctcacttgatcttagttttcccacgtgaaacaggaacaggagtacttgtctcaccttttaataggatgtcttgatataagatattggcttagaagatacattttaaacttaartgactgtacagttactgggtggtagcctgctcattgtgactgttgccactcccttctgcattactatttaaatgcctttgtgcttacaacctaattttgttttcccacctatgggctttgctatctgtgttttgtatctcagttcacttgaagcccttgggagcagctaaagcagttttctttctgagtctcatcaggtcacagtgtgtatgtttcgggaggctaagagggggttgaagagctgtgtgaggaaaaggccctttggaatgtgaagacattcccatttgcctggtaatgggatcctgataggtgccttagtcaggtgggaagcagggctctcgatagggccccattgctcggctgcactggacctaaacatggccctttctggaaatgctaacagtgcatatgattagcaaagaagaggatacgaacagacctggagatgttaaaggcactataggggccaggcatggtggctgtcgcctgtaatcccagcactttgggcggtggaggcgggaggatctcttgagttcaggaattcaagaccagtgtgggcaacacagcgagatcccatctctacaaaaaatgaaaattagccaggtgtggtggtgtgcacctgtagtcccagctactagggaggctgaggtgggaggattgcttgagcccaggagtttgaggctacagtgagctatgattacactactgcactccagcttgggtgacagagaccctagctcaaaaaacaaacaagcaaacaacaaccaccacaatgcgctgtgccattgtgaagtggtggtgttctgcagatgcccagggccctctccctctggagtcagcacctcagccctgcccggtgttcagaatcaggaatgtagtgccccaagcccagggtggaaggagcgcacccagcctgtggtgggacagtgacgagtgggcttcaagccttctccatttcccctccccggtgccacccctctttgaggtggcgtctgtgttgctgtggcatgcacagcaccctcattatttctctctctcttttctctcccctccctctggcactttctcttgtttttctctgcatggtttctgtattattagtcctgaggtaagaactggccgagtgccttgtctacagccccttttcctcctttgctgtctgtcctgcccacccaggccctttgcaccttcttgtctggagagcatcaggagggtcgggtcggggcgttcctctgctggctgtgtgcagccggctccaccttcaggctctccttgccctttcccacccaggtttctgtgcccaggtgtcttctccgttctygtctctccccaggcggagggcctgcagcgaaggcccatgtgggtggggcacctcctcttcttccygacccaagcctcacctcttgtcccctgtgcagtgtggaggtcatccgtctgggccacagctacttcatcaactgggataagaagatgttctgcatgaagaagcggacgcctgcagaagcccgcaccaccaccctaaaygaggagctgggccaggtggagtacatcttctccgacaagacgggcaccctcacccagaacatcatggttttcaacaagtgctccatcaatggccacagctatggtatggtggcaccactggggactgggggcttgcacctcgcctggaaggacagtggaactggggccccacagtttccttaacattggttttttcttccttcctagttgggtctgaggggcctagaagaaagggtccatcctggccaggcacrgtggctcatgcctatagtcatagcactttgggaggctgaggtgggaggattgctcgagcccaggaatgcgagacmagcctgggcaacatagtgagaccacatccctacaaaaaatttaaaaattagccaggtatggtggcatgcacctgtggtctcagctggccagtgactcaggaggctgagatgggaggatcacttgagcctgggaggtcaaggctgcagtgagccatgatcttccactgcactccagcctgggcgacagaatgaggccctgtctctcgagaaaaatccacacacaaagaagaggtccattctgtgtcccatgtcaagaagcagatcctggctgggcgcagtggatcacctgaggtcaagtgttcgagaccagcttggccaacatggtgaaactccgtctctactaaaaatacaaaaaatagctgggcgtggtggcaggtgcctgttttcccagctactcggggggctgaggcaggagaattgcttgaatccaggaggtggaggttacagtgagccgagtttgygccattgtactccagcctgggcgacaagagtgaaagtctatcaaaaaaaaaaaaaaattagattctgagagtcctccccttgtcctctcctgatgccctgaccctggtctcagctccaggaattaggggagctccttggctgtttgaagtgagacactggcctctgggcatcctggccaggyggaaccctgctagactctcccctgttgctgctcagggtccttgtgagtctgtggaatgtggctgtggttggacttcccagtgtggcccgtggctgtgctgctgggatggcctggggcagcatgtggggctgacttttatgcagagtgtggacccctcttgtgactgctttctgtactgactgatgcctttcggtcagtgtctgagccttgtctgctgctcaggtctaatgggtgcaaggaggcctgggaggtgtggaattggagctgccctgaggggggtgccgcctagggtagagacagggatggtgagcagtgggtgccggggctctttcatggccaggccttggggttctggaatctagggtgcctgatgcctcctatcccgcgagtcagcaatgtgactgagtgactcacactgtgacagctgctcagcgattagggttgaggggctcagtgcctacggggattctgcattggagatgtttttccatgctctggagctctctggctctgacattgcttctttttctgccctggctgtatgtaggtgatgtgtttgacgtcctgggacacaaagctgaattgggagaggtaagattcagtctccctaattctatgtgccagtgaaacagggtgcctggccagtaacagtgtagtcaggagtgatgtgttgtctggataggaaatggaagctgcttggagaaatgggtgttttaaggcagaactggtgatgacggaagtggaaattttgaggtccaccgtggacaggagcctactgagagttgggagggcagggatgaacccttccccgggatgcagcctggcactctagcctttcctaagagccttcttatgtgtttcagaggcctgaacctgttgacttctccttcaatcctctggctgacaagaagttcttattttgggaccccagcctgctggaggctgtcaagatcggggacccccacacgcatgagttcttccgcctcctttccctgtgtcatactgtcatgtcagaagaaaagaacgaaggtgggccgaggagccggctcgcactctcctgacctgactctgcccttgggctctgctctgctctgcaatgcggctgggctggggcttcctgggcggggcacgtggctgagggaagccacttatatcacgtgtattcttcctccccacccaggagagctgtactacaaagctcagtccccagatgagggggccctggtcaccgcagccaggaactttggttttgttttccgctctcgcacccccaaaacaatcaccgtccatgagatgggcacagccatcacctaccagctgctggccatcctggacttcaacaacatccgcaagcggatgtcggtcataggtgaggccaggcctggggtgctggggcgtttggggacagcattcaggcctggaatgggtgaagtgtgccgggtgactcttgatgtgtttatgttgggggtctttgcctgtctgaatttttctggcactttcttcacctgccccattcatagkgcggaatccagaggggaagatccgactctactgcaaaggggctgacactatcctactggacagactgcaccactccactcaagagctgctcaacaccaccatggaccaccttaatgtgggtgtgaggagaggaggggccagcctggggggttctactcttagtgtgggggaggcgacttaagtttgttttattgtgtaaatttaaggtctacaacgtgatgttttgatgtgtatatatagtgaagtgattactacagtcagacaacttaacacatcagccagctcccatagttacctctttttatgtatgtggtgacagtccctaactgtggaatgtggcacacacccagtctacagtgcaggattattcattgtcgccctcacgctgtccattagctctccagacttacccaggtgtgcctttccactctgcctccaggagtacgcaggggaagggctgaggaccctggtgctggcctacaaggatctggatgaagagtactaygaggagtgggctgagcgacgcctccaggccagcctggcccaggacagccgggaggacaggctggctagcatctatgaggaggttgagaacaacatgatggtacgggctgcgggacgggccaaggatgggcacggagggctcatgcctgcaattcttgtgccaggaatccttgtggtattttcagctgctgggtgcaacggccattgaggacaaacttcagcaaggggttccagagaccattgccctcctgacactggccaacatcaagatttgggtgctaaccggagacaagcaaggtgagagcccagcagggcagagccagttgcaactgacagtagccctgttggacccttgcatggagccgaggacatcaggcaggcaagtgtgctgaccttgttgggtgcctgtccgtagctcctgcgttctctcttggtagagacggctgtgaacatcggctattcctgcaagatgctgacggatgacatgactgaggttttcatagtcactggccatactgtcctggaggtgcgggaggagctcaggtaaacaagaagcccagggraggcggtgctgtgcgttgtgcccagggctcaggtgggggtttctggaccatttagacttgaatccctgctccccactgccrttctggaagaccacaaccgtatcatttccacctcgacaggaaagcccgggagaagatgatggactcatcccgctcygtaggcaacggcttcacctatcaggacaagctttcttcttccaagctaacttctgtcctggaggccgttgctggggagtacgccctggtcataaatggtcacagcctggtaggcatcgctatccttarcttgggcagtatctttccagtgagcacttctgtccagggcttttatatcttgttctaatttcccctgatttcagagaagactggtctcaaaggggactgggaggagctgagactcccaggtgtctcctggaaagacnggctctctcaggtttctctgtgctccaggcccacgcactggaggcagacatggagctggagtttctggagacagcgtgtgcctgcaaagctgtcatctgctgccgggtgacccccttgcagaaggcacaggtggtagaactggtcaagaagtacaagaaggctgtgacgcttgccattggagacggagccaatgatgtcagcatgatcaaaagtgagtgtgggctgtgcaggtgtgtaggctgggcttgaggctggggaggggcccactgaggtctctggactgcagaagaatgacgggaagggggttgtaacttggtaggctctaaagtgtgtggccggtggccatcttcaccctcttgtcatctcttgtctctgcagcggctcacattggtgtggggatcagtgggcaggaagggatccaggctgtcttggcctccgattactccttctcccagttcaagttcctgcagcgcctcctgctggtgcatgggcgctggtcctacctgcgaatgtgcaagtttctttgctatttcttctacaaaaactttgctttcaccatggtccacttctggtttggcttcttctgtggcttctcagcccaggtaataaatgttcccagtccactgttgtgcaaatctgtaaacctgagggcagaggttctgtcttgtttatcactcagtcccccagggcctagctattttctggtacatactcttaaaaaatgcttattaaaggaggagagaaggagcctcrgaaaatttcttagggttctctgtatgtgacatcagctgtcttcctgtgcctgatgtgtagcaaagaaaggttgcatgctcccttgctccctgttctcttccagaccgtctatgaccagtatttcatcaccctgtataacatcgtgtacacctccctgccagtcctggctatgggggtctttgatcaggtatgggggagtttgatgatcagatgggatgcggggaaggtcactgcttgaaggagtcacatagacgtggtgtgtgacacttgtgcccatttcctgtggccactgggaaggcagttctttcagccggggaaggtgtggctggttctccctcctggctgcagctgatctagaactctcttgggttgctgaactaagttagtctggrggtagctggcttgaggttggttctagctgccaaagactttggaaaggaggaggcagggacagagtcagagtctgcccttggtcatccagggtcaaaacggcaacctctgaggccccctatgctacatggtcctcccacacaggatgtccccgagcagcggagcatggagtaccctaagctgtatgagccgggccagctgaaccttctcttcaacaagcgggagttcttcatctgcatcgcccagggcatctacacctccgtgctcatgttcttcattccctatggggtgtttgctgatgccacccgggatgatggcactcagctggctgactaccagtcctttgcagtcactgtggccacatccttggtcattgtggttagcgtgcaggtatgaggccatccaggaactcccctcttctctggaaggagtgagccttctgtccctggggctgccctgggcaccacagttctgtttctgggggaaggggcttttagggcrtgcgcctgcctgactatgcctactttctgcagattgggctcgacacaggctactggacggccatcaaccacttcttcatctggggaagccttgctgtttactttgccatcctctttgccatgcacagcaatgggctcttcgacatgtttcccaaccagttccggtttgtgggtaagtccccgtggcctccttgaatcggtgaggaatcacagctgttctgggactaacaggaccatcagctaatctgcacattcaacatttcttatgtgccaagtattctgtttattttatttatttatttatttattttcgagaaggagtcttgcccaggctggagtgcagtggtgcgatctcggctcactgcagccttcgactcactgcagcctctgcctcccgggttcaagcgattctcatgcctcagcctcctgagtagctgggattacaggcacacgccaccaagcctggctaatttttgtatttttagtagagatagggtttcaccatgttggccaggctggtcttgaactcctgacctcaggtgatccactcacctcggcctcccaaagtgctgggattacaggtgtgagccaccgtgcccagctagcacagagaaatctgaataaagrgaaagggagcctgccatgtggctctctgggaactgtcaatccaggaagaggaaacagcaatataaakgccttcagccctggcctgggaggaggtcttctgcacgtggagctggggaggagtggaggaaatgagttggagggtgggggtgtggaatgagtcaggattatttaagcccttatgggtcagaggaagaactttgagtttttgaattttaatctaaatgtgagaggaagccattggagggctttgagcagagaaataccagaagcttacttatgtttttaaagggccgctcttacagtttcgtggataataaagtgtagggggcaagggtggaaatgggagactaggaggtgagagcagtcaccaggtgagcctaatgagggctcggaatagagtaaaaggccgtgagattccagagatgttttgaaaatggaaacaacaggccgggcgcggtggctcaagcctataatcccagtactttgggaggccgaggtaggcggatyacctgaggttgggagttcaagaccagcctgacccacatggagaaaccccatctctactaaaaatacaaaattagccggacttggtggcacatgcctgtaatcccagctacttgggaaggctgaggcaggagaatcgcttgaacctgggaggtggaggttgtggtgagccgagatcgcgccattgcactccagcctgggcaagagcaaaactctgtctcaaaaaaaaaaaaaaaaaatggaaccaatagattgaatgtggggtccaaagaagagagagaaatgaatcaagataaaaaacaacaaaaaaacagaaattaaaaaaaaatttttacagaaatgaatcaagatccattgcagggtttttagttggagcaactgaatgggttgtggcatttcctgagttgagaaagaccaggatcagatttggggaaaggaaacaatagttgagtttgggccacgggaaattcaagatgcctggtatgtcaagtctggcagttgaagcagcaggtctggagctttgggggagtttggagctaaatttggagatttacatttggagggtgagcctggagaagcgggaagccagaggtgacttaggctttgagagtagggaagtggagctgccagaaatgggaacggggaatgtctgcctcgtgactcccaaggccactgactcctcttcatccccagggaatgcccagaacaccttggcccagcccacggtgtggctgaccattgtgctcaccacrgtcgtctgcatcatgcccgtggttgccttccgattcctcaggctcaacctgaagccggatctctccgacacggtgagaagccaggctacctgctgtgggaggcagagatggggtggctggaaaggcctcntgtgaacactgnggggctctgtggggccatgtggctgttcagtgtgttggtgctyatctgttcttcctggggacagacaccctgtgcagctggccacagaggcctctgcgtcagcctggtcccaggtgctgtgggtcggaggcctctgtgtcagcctggtcccgggtgctgtgggtcccttctccttggcgatatctgacacctccacgctgacagagggctcttccctgtgcccctctgcaggtccgctacacacagctcgtgaggaagaagcagaaggcccagcaccgctgcatgcggcgggttggccgcactggctcccggcgctccggctatgccttctcccatcaggagggcttcggggagctcatcatgtctggcaagaacatgcggctgagctctctcgcgctctccagcttcaccacccgctccagctccagctggattgagagcctgcgcaggaagaagagtgacagtgccagtagccccagtggcggtgccgacaagcccctcaagggctgaaggccgaggatggatgccctgtgccagtgaccagagcacccagggctggccagtcactgagggaacagygtctcggaactgctggtcctcattccttgcttcccgtccccccggtagactctgtcctgctggtcccaccacacatggctgggacatctgttcccagctgtaggcccttccaccagctggggagctagagggagcaggyccaagggcagagcagaggctgaggcacggggagccagccccactcggggaccagaagtggaaccaaaaacaagaaaaaactgtgagagattgtgtctgcccctgccctgcctgggacccacagggagactataatctccttatttttttactcctactccccagaggggccctagtgcctctgttcctgaattacataagaatgtaccatgccgggaagccagagacctgcaggggcctcggcccctcacatcgtgtatgtctctccttgatttgtgttgtgtccagtttggttttgtctttttttatttggcaagtggaggaggcttttatgtgacttttatgttgtggttggtgtcttaactctcctgggaaaaggaggctggcacacactgggatgccgcagcctggccggctgtggggtggtttgggaggatccatgtcggctctgcctgcagtgaccagtgctctgtggggcagaggagctgaccagggagggaggtacccatgagcagagggtagtgggagagtgtaaaggagggtttggtcctgtctgcttcctcaccttgagagtaaagtgctgccctctgcccccaacacacacacatatcaattcctggattccttagtcctgctggccttgggctggagcctaggaaagtggcccccaaatccttagtgagctaaagctgggtctgaaatttggtcagtggggaggggtagttttcttttcttttttctttttctttttttctttttttttttgagatggagtctcactcttgtcacctaggcaagagtgcaatggcacaatctcagctcactgcaacctccacctcctgggttcaagcgattctcctgcctcagcctcctgagtagctgggattacaggcacacaccaccacgcttggttaatttttgtatttttagtagagatgtttcaccatgttggccaggctagtcttgaattcctgacctcctgacctgcccacctcaacctcccaaagtgctgagattacaggcgtgagccaccacacccagctcagggaggcgtagttttctttaattttaaatttaaacccaagtttattggcagactcccttttgacctccctttgcctccccatctggtgctttcttgcatctacaccccagggccctgtggtggggctgcagggggaagctgtgcacctgagatgaggctggaacgggaattggcctctctgctcccttcttcagtaagcaaggagccccgcccctcaggcccagcctctggcaagaggtggtggaatccttgtgccgggtagtagaggaggataagggcaaaaccaggcccaggccagtgcctggcttggtctggatgggacactgtcagagtttggccacagcctgtcctttacttcatccacacctatgaagctattccctaaataaggcatttcccaagttagtcgctacctaatcagccttgagaagaatcctttcctcttctttgatagtgggtcgggggattcttcaggaatggtttggagctgggagtgggtagggggattttaaatgttccatatgggagccccaaaggaactggatgggctgcagtgaggtgggggcgggtgggcagggaatgggagaggggaagtcttggcagggaaatcccttttggccacacagtttacaaacccagtatcatgtctgtctgtgtgtctctcaaggtgagagtctgatttttataccaaagaggaaatgattttttttcatattttgtttgtctatattatataaatatatatatacagttatatatatatatattattttttggttctctctcgttttttagggagggaagaaagtaccaagttgcattgagctgtaattaaggaacattataatttatgacacatttctatacttgcaaaaattatatcattttatggatataagagaaaaatgcctttttataaaatttcratttctgagaagtgtgtaatttgtctcttttctgatgtttaaccaagactggtggtgaaagtaaagacagaaactgtctcttaaatgtaattgagtgggtagatctgggatatcttggacaaattggaatctgactggtgtgggatagcacctcatccatttgcagacctcccgggatctgagtttcagctgaagatgaagacggggcagtgggtggtactgagcggcatatcgtatggactttggctgggtgcctaggaccttgagctgtttacctttctccaaacgcaggccaacctgtcatccctaacacacgccagatggatgtgtgtgtagggaaagtacctggtaaatattgtaaggttttgttttttaactctgcgcttttccgcatgcctcacatcttcctggcttctcaagtgagtatcaaggaagctaaagtcttatattaaagggagctttcctccagggaagggagggcggatgaggatggggtcctaggagtcagggccagggttagtgctggcctgaggagaaagaagtatagcttcctccgccgatggccaatatcagcatgatccagccccacccgcaggctaatttccccctgacccagccagtcttcagttatggaacaatccttctcaaaaacgtagactgggtgtggtggctcaatgcctgtaatcccagcattttgcgaggctgaggcaggaggatcacttgagcccagcccaggagttcaagaccagcctgggcaacatggggagaccccgcctgtattaaaaaaaaaaaaaaaaagggtgggggagcggagggtgtatggggggaagatgtgaagataagatctgtttccctcttcaggagaaacggcccctggcgggaatcccgccacagaccgccaggaacaccacctgacacccacctccacccagggagaggctgtccagtccacacaagcctttctttggggtctgtctggaaccctgagctttgggcagcaagtggcatctggcttcagtgcccccacccccgaaacacagaaagaagccttaatcccttgaggctggtgaggccccaagtccacccctcccacaagacaggtcttcagcactgcgctggcctcccgttgggggtctgttcagccactgggaatgtcttccttggctcctctcgctgaccctggctctcctgcacccaggatcctattatgtgtgtctgaggggcagggccaatgtcattttaactttcattgcctcttggggacgcgttttctccgtcgcgatatagacacacgcctccacggaggctccgggcactcgggctccccgttttctcccctctgccgcaggcatccctggtcttccttccctgcgctgmctgagcacctgggctcctgtgggagtggcttccagcccctaggtccccatcgtcctagtgccttttctgagtgcgtggaggtgaagtctgtccgataccgcagctttgttccactgagcctgcttatctccaagggcgttcctctccactccactaaagcagcacacacccatgggcgcccactgccgtcgggaggagctccacctctgaactctcacaattcattcagcatttggccatccatattcttcagttcttcccgcttccatctgtgctcccagcgaaaactacggcccctccctttcctcctggtcgcttgcttccatatgtgaacccttacttgcttcccaatccagcccggagcccgtggtctggtactcgtcgctttgccccggaacattccagccttgggtcagcccagcgtctcccagggtgagctgtggaatgctgaagggcagcacacaaccacggagcaagaggagcggcagctgcccgggctccctccgcaggcgcctctgcacggcgaggagacgctgggaacctcattctcctgcccctccctcaactcctgccaccgcctcccaccctgccctcagcagatggtgctgcctcctacttcacggagcaaataacttctgcggctttcctctcaactacaaatctcactgcgcacaggcacgccggccttcccctttcctttcccctgcctggggaggctggactctcctgtcccgctccctgtggccccgcccctcccctcctcccaccactgcaccttccattgtccttcaccaggaccttctcttgaccctgccttcatttccctctccgttgattctttccttccccaaattagcctgctcagttttcttccccctcacctgacccctaacccctatcaactctgttgtggtctgtgtccctcccattagcctctctgttatctcttccactgcctgtaatctggcatctccttcaccagtccctgaaatgctttcactaaaatcacctttgaccttcatgttggccaagtccagaaggcatttccaggtctgatctgacttgcaatctcttagtcatttgactgtgttggctgccttctccttgaaactctgccctctgctgactttgttccactttctcttggtttaactgctgcctctctggttgatccttctgtctccttccttggagctccttcctctgttcttcttcctaccatgccccaggactccatacttggctctaagcttttctcttctgtgcagggtccttgaaggtccccatgcaaacccatggtttaaataagatttgtttaaacaaataagatttaacaattaaatggagagtcaccattgttcacctctagattggacttcttccttccactccacgctccagacccttgtattcaattatccattggacctctccactaggacgacccaccaccacctgttattcaacataccccacactgaacattgtttttcccaacacctgttgctcctcccgcatcctctatttcagtgagcagcacgcgatctcaccagtcaccaaagccagacacacatgtcctggagaaaaccctacaacctctgctctggggccaccacactgtaaatcatatatttcatcttctttgatgtggagcatgaaatgattaagctgcaatgtcctgagccactgtttcccagtgattgtgacccaggcagggtcacgacagccatatttctgtccccaaagcggggccatctaggttgggactcaaaacacaaagaaattctgccacaaaggttcaatgtcactttccttggccccaaaagagaaactggagagaccagagtgctcagattaggtaggcagctgcagcctcccactgtagccaccctgcagagcatgagggagggactcactgataaagcaccaggactacccactgcagtctctacttcagaggaagcaagccattgatggagatgtactaaacactgggctctgcggctgaaggaaggagctgagttctcctgcttatctctgctccagtgtcctatcttgaaggactgtgtcctgaccccagtgagaaacatgacctrtctgaccctcccaacccttcctggaaactttccagttctcagtgagttgctgggagctgccctgctggacacccgcctggggagggtgtagacttatcttgccgggctgagagagggaagtctttcccaatactagtctattaaaacacacactgggctgggcgcagtggctcacgcctgtaatcccagcactttgggaggccaaggcgggtggatcatctgaggtcaggagttcgagaccagcctgactaaaatggcttcaccctgtctatacgaaaaatacaacaaattagctgggcatgggggcagacgcctgtaatcccagctactcaggaggctgaggcaggagaattacttgaacctgggaggcggaggttgcattgagctaagatcaggccgttgcactctagcctgggcaacaagagcgaaactccatctaaaaaaacacacacacacacacacacacacacacacacacacacacacacacacacacagtggcccggcatggtggctcatgcctgtaaccccagcactttgggaggccaaggtgggcagatcgcctgaggccaggagttcgagaccagtctggccaacatggtgaaaccctgtctctactaaaaatacaaaaattagctgggtgtcctggcgtgcccctgtaatctcggctactcaggaggctgaggcaggagaatggcttgaacccaggaggcagaggttgcagtgagcagagatcgcgccactatactccagcctgggcgacagagtaagtctccttctaaaaaaataaaataacaaaacaaaacacacacacactttccctctctctctctctccaaaacgtgatggagtgtctcctcttaagaaaggagtgtttttggacacagaaagagggagttcctccagcctagcacagcctgagtttggcctgggctggaaattctgcagaaatcttccatcctgccactgggaataggacagggaggcctaagccgtgttttcggccccccggggcccagcagggacatgtgtgggttccaggactggggcaaggaggagaggatgcccaggtttactcaagggcaggcaggaggtgaggagggggtgacaggtggaaggaaaggaccatgtcccactctccactccttcctcatgggccactcttcatttcactcgcagccccgcagtgcacagctacaagctgggggttcatctcttcctggtcccctactaccttgggtgcagcwcttctgccaraaccttctgggcgcctgctgctgtgcctgggctccccacgcagggagggacacccctggggcggaaggcaggcagctgcatagctgagtggctgcttctacaacacctggagaaccgctggggctagaagcaaacatgcagcagtttgggcc

SEQ ID NO: 95758 - DNA, 41889 bp, Homo sapiens
  misc_feature (1)...(41889): n = A,T,C or G
gacttaagatttgtgttttgtgctcatttattttaatgacaaagcaaacttgtcactctttcagtgattgcttacttatggaaatagtattcaaaacaaaattttcaagcagaagagagaaacgataaaatttgaggacaaggccaggttttcataataataatttctagcacacaaaattagatccaaagaaacctgtgtactactttgatactttatagatcttggcatattcatactattctaaagtttcatactaaacagtacttagtctaatttgcctttttatagagagcttaggtttttgcggaacctgggacacagatttcttcttatctttgtttttatttcttaaccattacaactggcattcaaaaaatatttatagaaaatgctgtatttgagagtgtgtgggtatgtgtaagcttagctgtgatgaaagagtaatagagtcagaagcaggggagatgacttctagggttttgtttttttttaaatcttaaaatttttttgttattttaaaaaaatagatattatacttactgtgtacaaagttttgaagtatacataactgtggaatgactaaatctagctaattaacctaggcatcaccttacatagttatcatttttatggtgagacactttacatccactcttaacatttttcaagaatatagtatattgttaactatagtcaccatgttgtacaatagctcaagatggattctagtttggcctgctactaactctgattttaggcatagtcatttagtcattgcacctgctgcgatggcttccttgtcattgtgaaatgacgttatggctccgataacagtccaagttccttgtattctaaatcgccaggattttgtttggggaaataagtactttccatgaggcttactttcaagtatagaactgaagtggaataaaacttattcttttagtctaatattccacagtcatctttagctagagatgccattaatacagagctcttgtgttgaaaactcaggtacaatttattcatagaaaataactttctgttgtgaaatagcaaaatgcagtgttcccaatccaagtgtaagtttaatttttagagtagactgggtgcagtggctcacacctgtaatcccagcgctttggggaggtggaggtgggtggatcacctgaggtcattagttggagaccagcctgaccaacatggtgaaaccctgtctctactaaataccaaaaaaaaaaaaaaaaaaaaaattagtggggcatagtggcgcatgcctataatcccagctacttgggaggctgaggcaggagaattgcttgatctgggaggtggaggttgcagtgagctgagtttgcgccattgcactccagcctaggtaacagagtgaaactctgtctcaaaaaatatatatataatatatatatatattttttacggtagattttaaacaccaaaattatgaaaagagactgtagctaaccttattacatgccagttcttctaatttatttaagaattattttaactttttttttttcattctatttcaggctggtacacccctccaaaggaagatggctaaatrtgttgactgttgtatgtttggactaatgttgctttaaagaaaatctttcyaacatgcagacaaaagctttgagtgcccctattacagcagtaccgaagatgttagttaatagatattttagtggataatctgtcatctgacatccagtataagttacagccttygcattttgctcattttagatatcttggactgagcagtggggcctttactgtatttttcctgataaatacacatactggccactccttatctctttttcttgaaaagtgaactttttaaagcagccaagtcaacatcaggctactgaagttgaggctttagggtaactttcctatattgagcccatgggttacaaggatttgcaatatattgttccatttacagccaatacaggtttaatcgatgttcaatattggtttaggaaatttaaggccttctaaatcataatagctctttcatgtctaaaaccattttatgatattgccaaaatgtgataggaaacctactcattaaattgttaaactttttaatgactatgtgaagatatgaattgtttcctgaagataatactcttaattgagttgtattgtacttcttaggcaaagcagtgtaaaactgtatcaattaaggcttgtgagtagtgatttccactggggcatcagagtcttggctgggctgaatctgctgcttgttggttcagtgtttcttatgaacaagagccacagtacagagcttcaagttatttaaaatactaagtcatcttacgtttccattttattaacgggatgttgcaatcgtttgtaaactaataaacttataaagtgattggcacaaagactccttgagcaaaagctgtgcagttaagtacaaaaagatacttaatttggagactcttacagtaatttttgccatgtcaaaacaatggcttttacattgaaagattaatagaaactctacatatgttaatttttttatagaacctgactcaaatcaaggtactctccattttattgccttacctgaatcagtcctttttggttggtaatagatttttttatacacccacgtttgatttaaaagtaaattctagttcttaagcacttttaacaagaaatccagaagcacatttttctgcacaaacaagttacaaagttcaaaagtgtttcttgtgcattagctttgagattcagtttttaactttgtaaaccacatctgagagacttgtcatttctacattgtgtgtgtttaatttcttttgattccattttggttaagagagcagtaaatagattttctggtattcttgttcacttgattacatttgtataaagttctgattgccagttgctcagataacaagtgacaaggcagaattctttaaatcagtaaagttccttaagcctaaggctaaatcttgaatacattgttgaattctttaatatcctgatggcaagcagactgatagctgcacatttggcatgctttgtttaatggattttatttttaattgcagatttatttggcaatgtacagtaaattttgtaaacttgcatcaagtttatgaataaagaaccatttaaaaattttgtttgtgctgatcatggcaagcaaaaaaaagattactttctcatttttccctcataagaaaactctgcttgatgtgtttgtaggctttattgagtttctggaataagatatttaaggagggaagtggtgaggggaggcttggaagacaggcagatttaacaagagaaagtgaaagtgtgaaagaacctggaaatagtctgtacaatagtcaccttttcctccgcctttttcctcttccattctcattataaattcaagtgctactttttccttatggctatccttagttcccccagtgaaaataatctgctccttccttagcatacccatggcctccttgcacacaattgacagattatttcacatacaagaagtccagaggtaggacaactccaggtactgtacatctgggctttgctctgcttccttgagatttttctatgttggtttcatcttttggttgcatgttatgtgcagcccccttacttgatccagaggtagataaatgcccctgtcttctagtgtctccttaggaggtgaggaaatctctaaaagcaccatcccatcaagcacactgcctcttgcctttccttggctacatcagggacctgtgcccacccctaaaccaatggtggtgaaaagaatgaaaccatcgtgattagtttgcacaaatggttctcaaagccttatttggggaacactggagacccctgagaccatttcaagaggttttaaaagactattttcataatattaaaacatttgccattttcactcattcttccatgtgtacaatggaattttccagaggctacatgatgtgattttgcaacagattgaattcagaagcaaatatgagaatctatttgtcttctattaagacaaattaaatatttccaaaaatgtagtgatgctgtcactggtaaactgtcctctttccctactttatatcagccacaaagaaagaacgcccactttgaaaggcagtcaggtttcattcagtagccagagaatggagaaggggagctcatactctaaaggcaccttctcccagagggatgggaggctggggagtttaaagagttagctgaggggcaggggaggtatgaacggcatgcacagactggagttccagacaagcaggcatagtccctgaacatgctgcttcatacatccatgttcgtaagatgccagtgagctttctttagggagaggattttagcattatgttaattatctaaaggtaactggagggcgcctgtttatcttcctctggtattccgcaaggggtcaggaagctctggtgacatctgggccatctggcttccttaagcagctgcgcctataaatagactatggaaaaaaactggctgggcttggtggctcatacctgtaatctcaacgctttgggaggcggaggcagagggatgtcttgaggccaggagtttgagaccagcctgggcaacatagaccctgggtctaccaaaaaaaagaaaaaaaccacagctactcaggaggcttatgccactgacaatgtcatactatccaccagtgggggaaggaggatttgggaaataattgttttccataaaaatatttcgttaatgtataacatcggttttttaaaaagagttaagcattaagatgttctgatttaatttttaatatggtaaatattgatagtcataacacacataaactattggtcgtgtcaatattttagggtgtaaagggtcctgaggccataatgagaactgctaatttagaccaagtttctgcccaagatctggcgatcaaatcagggctcccttaggaaggaattggcgggaggaatggatgttaggtggggacaaacctgtgtctgctgtgcttccatttcttggtggttctcagtttgagcatgcatcagaatcgtcataaagtgtgttaaaacagattgctgggcctcacccccagtgtctgattcaggaggtctgggataaggaccgggaatgtgctaaaacttagtagtttccaggtgaatctgatgtccctggcggggaactggtgcacagcttggggcgtgcttcacagcaatcatctcactcagctaccttagaatggcaggtgctatttatgccattttactcattcgaaactttaaacctgaagattacaacgagttaactaagtttacaaggaataaaggcagtgattttcacacactaagaattttttaaaagcaaacgtccgtttataaatcgagcttatgctatttaaacaggcattgggactacgaagagcaataagtactacctagtccctgcaaggaatttgtgaattagagaaagatgtaaactcagaaatatggcggtgccagggcagtgagaggcacaggcacagaagaagaatttattttcactgcaggaggcctcctagaaagttgccaggagcggtggcttatgtctgtaattccagcaccttgggaggcccaggcgggagtatcgcttgagccctggagtttcagaccagcctggaaacccgtctctacaaaaaatacaaaaattagctgggcgtggtggcgggagcttgtggttaaagctacgagggaggctgaggcgggaggatcgcttgagcctgggaggtagaagctgcagtgagcagaggccgcgccactccactcccgcctggccacagcattagacccaatctcaaaaatgaagaaaacagttccgagcgtattacggaacggagtacacctcggagtacgggctccagacgagggaacgcaccggcgttgccacgcccaccttccccgtccagccggaagtggcgcggacgcctgctcagtgcgcgccggccgggcaaccctatgctggcgtaatcgggttcctccgagccgccgtaggactggttccggcgggctggtgaggaatggagccggtaggctgctgcggcgagtgccgcggctcctccgtagacccgcggagcaccttcgtgttgagtaacctggcggaggtggtggagcgtgtgctcaccttcctgcccgccaaggcgttgctgcgggtggcctggtgaggagaggaggcggaggcgggaagcttgcctggggacacgccgtgggcatgtcccaggctggcggggtggggggagagacccttgggacccaccagggccgtccccggctcgctcgccctacctgaggtgaccccctacccgcgaggtatctcccagccgtggtgccccggggggacttccctgaggggcgaagttccccttaaggttttctccatatctggctctycttccgaactagcgccctgactgacacctacctaycccggggactttggatcccgcagggatctcctgctgctgcgccagcgggtgggggtttgtgagctgtgggagagacgaaaatgaacgtccgttcgcaatcctttgtgcgtttgcgtcctcagcgtgtgccgcttatggagggagtgtgtgcgcagagtattgcggacccatcggagcgtaacctggatctccgcaggcctggcggaggccggccacctggaggggcattgcttggttcgcgtggtagcagaggagcttgaggcaagtagcaaggggtgtcatgcacagtcatttgcaggttggtggttcagtctttgagaactatttttttttaaatcccagttttgttaattaaaggaacatcttctcgttccgtgaaaagattttgtaaacatcagttttagtgactacacggtaaggatgtgtcatgatttatttgaccgttcatcaaatgttgggccttttttttttttttttgagacgtagtctcgctctgtggcccaggctggagtgcagtggcgcgatctcggctcaccgcaagctccgcctcccgggttcacgccattctcctgcctcagcctcccgagtagctgggactacaggcgcccgccaccatgcccagctaattttttgtatttttagtagagatggggtttcaccgtgttagccagaatggtctcgatctcctgacctcgtgatccgcccgcctcggcctcccaaagtgctgggattacaggcgtgagccaccgcgcccggcatgttgggccttttaagtatccacattttcactattaacaacaacgctgtgcagaaccttcccttcacctgcttcccttgaagcaactttttgttgtctgttttaccgggaagacaactgggtgtgtcttgctcagtgagcacacctagaaagccaagaaccaaaacttaaagccaaatatttcaacttctgatcctgtactcttttgcttctctggcccccaacttcaaaaggggagccaacaccaggagagatgaagactcgaactgtggagtcagaggggctgcagggtgtaccatctctggggagtggaagggaaccatttgacagtaaagtgccaacctgctgctctgtcactctgtttactttagtacggcttacagacagacataactacggtgcagccgtcacaatcaggaaattatcactgatacatttctaccattttatcctcagactcggttcagattttgccagttgtcccagtaaggttcttcatggcaaaaagatctgttcccaattgcaatttgctctgagtaagtcctgtttctttaatctcctttgatctggaacagtttctcaagctttgcttgatttttcccaatcttgacacttaggaaaatcacaggctattttgtagaacatccatcaattgtgtctttggcaggaaataatcacagaagtgatgctgtgcttttttcacggcatactttaggtggcatgtgatttccattcgtcttgttattggtggtattacctttgattactcaattaaggcgatgcttgccaagtgtcttcactaaaatcactcttctactgtaatgattgttttgtgaagagatcatttgaaactatgtaaatatcgtgtttcaattcatttatttatttatatctgtacactctcggagtcttatttaattcagtgggatataatctgttactgtattttggtgctcaaattacccctctcaccccctagtttggctagtaggagctccttcaggctggcttcagtgtctttttagagatgactccattatctttgagcacttttcttgttttctggcacaagatgttctaagcttgtcttgggttttacctgccttggtcctggaattggccattaagccctggctccttttgatggagtgtggtatttagaaatcaaggtctagactctctaagtgtactccttgccattgagggatttgctgctccaaagcccagtcattagagccaaggaatrtaagtatgtatatacatgcatgtgtatgtatatacattagtatatacatatacacacatttacaattatatttctatatatatgtggaggctcatgagttcacacaggtgcatccttttcgaatcaaacgcaggatgctttctagttttgtctctgctcatatttgtacctcccttttgggcaaagggaaacctggttctcatcattcttaatgtatttagatattacatcaatgccccatatgtaaccaatcttctgtttcccccttccttgggtggtctttctccttaccttgtttgggctctggaactctcattccagggagctggccagtatccaaaggcaggcttgtagaaaacttttcttctctggcactttgtctcaactcttcccattttcccagaagtttatcatttggaaaaawtcaaaatgcaagcagatttcctcgaaagtgttctctggagcatcgtttataataagggatactaaaaacctaatgttaatctaataaataaagctattaaattatagactgcaaatgcattaatgacaagagaaaatgttgattttaaaagtgaaaacagattatgaaattatatatttagtatcatctgaattattaaagacaaaaaagggagagtagaaaagaaagccaaaatgttagcttttttttccatttactgtttttaaaaagttttctatggtttttaaaaagttttcaaatttttaccacagcaggcatgatttttctatagctttaagagtttatacattgtagtggctgttaatagccagacagacttagttgtgaaccatagctttggcatataccagcggtgtgactttgaaaaagctactcaacctctctgagcctcaggtgctatctccataaaataaaaagaaaaataataattttcctatgcccttatagagttgttgtgaggattaaataatgaaaaggtaatgcatataaacattacttacaataccaggagcataagttctcaatagatgtctattaaatattcttttattagtatcattattaaagttcacatagttatagtaatgcccttagaggagttcctccattgtagtaaactgctggtgagacaaaaacatgaaaactctatccaaatcatacgtgctgtttatttgtgttttccaagttatctagtggacatgggtacttttatagccataaagaaagttgatttaacttttctattagaaatattttaaagtccgccaggcatggtggctcatgcctataatcccagcactttggaaagccgaggcaggcaaatcacttgaggtcaggagttagagaacagcctggccaacatggtgaaaccccgtctccactaaaaaaatataaatatttaaaaatatcaaatatataaataaaaatattaaagtacaaaagttggctgggcatgttagtgcaaacctataatcgcagctacttgggtagctgaggtaccagaatcgcttgaaccagggagatggagtttgcttgagctgagattgcaccacttcactccagcctgggtgataaagagtgagactgtgtctcaaaaaaaaaaaatttttttraagtccaccaaaagctttataaaacagcttgccatttgtaacttctttgaacagtggaatgtggtgtcagctgtcttaactgtgctttgagaacatttcatattgaggcttgttatgtcactacttctagtgtgaattaggaaggaaaattcagcagttgcttttcagtggatgcctcataaactctcaggaccagacttttaatacttgttcaggagtaagaaacctgaggcctaaaagcttgctgagggttattctgctggtttgtggcagagttgccactaagacctaaatctgttttttgttttgtttggttttttttttttttgagacagagtctcgcctgtcgcccaggctggattgcagtggcccgatcttggctcagtgcaacctccaccttcctagttcaagtgattgtcctgcctcagcctcctgagtagttgggactacaggcgcaygcagccatacccggttactttttgtatttttagtagagatggggtttcaccatgttggacaggctggtytcaccctggcctcaggcaatccacccaccgtggcctcccaaagtgctgatattacaggcgtgagccactgtgccttgcccgtaaatctctttttctgtctcctttactcactataccaggcatcacagattcagatgactcgaaggtcaggcaggtagctgaagagggtcaggtagctcaatagtcgtagcaccatggcagtctggaaaggcttgcctccgtttagccttagttaagaggcacgtagtctaagtgttgccaaaatgtccagtttttaaaaagaatctggaaatccacattttatgtaaaaattcggtggaattttgaacattggcattcagtttacattttctgaaaatgctgtgtggaccaaggaaactatatccgtaggtcttgggcagccctgggccccacaggccatcrtgctatctgtctcttttattagtttatctatgtagaatgtattctgaaacatcttggcattccctcaaattataatggaccaactttttttttccatttaactaacaatgaggctttgctatatcctaagtacttcattttattctggtagtaaaaaatatttgaaaatagctagcttggaaaaatatatcatccttttcatttaattcagctgctttgccgcttgtcttcaattggaaagtttagttgaaaacaggtgagtctgaataagcccagctcataggggagataggggacaaataagattaactaggggtaagggatgttgcatctgaggtccagagtactgagggagtttaggaaaaggttttggagaggaggtggcacttaaggtgtctctagagggaaacagtcttaagttccacaagaacagagcaatagaacatatggggaagtcggtgtgtctggataatattaatagtaagctaaggggccctgaaggaagccttgctggcaagcctggaaatggaggcttggagtatttgatttgataagcagtgaaaagggagtgatacagcctgtataccttccccagtgctgagatttttctgatactgtgatgcctgttcaaataaagcaagtgcatcttttgctggtacttgatgtttttgttctaagagcttcagttatcattatgaaaatgaactttttgagggctggaatgaagaaattataggtgtttagtaaatgaactgaaaatgaaagagcatgagtgaaaagtaaatgagaagtagattgactcagaatgccaacattgacctgaaagaaggtagggtaccagcagtttggatggggtgatactttttttttttttttwaatttctgcgatacatgtgcagaacatgcaggtttgttacataggtatacacgtgccatggtggtttgctgcacccatcaacccgtcatctacattaggtatttctcctaatgctatcccttccctaatctcccactccctgacaggccctggtgtgtgatgttcccttccctgtgtccatgtgttttcattgttcaactcccacttatgaatgagaacatgcagcatttggttttctgttcctgtgttagtttgctgaaaatgatggtttccagcttcatccatgtccctgcaaaggacatgagtgcatcctttttctatggctgcatagtgttccatggtgtatctgtgccacattttcttcatccagtctatcactgatgggcatttgagttggtttcaagtctttgctattgtgaatagtgctgcagtaaacatgcatatgcatgtgtctttatagtagaatgatttataatcctttgggtatatacccagtaatgggattgctgggccaaatggtatttctctttctagatccttgaggaatcaccacactgtcttccacaatggttgaactaatttgcactcctacaaacagtgtgaaagtgttcctgtttctccacatcctctccagcatctgttgtttcctgaccttttaatgatcgccactctaactggcatgagatggtatctcattttggttttgatttgcatttctctaatgactagtaatgatgagcttcttttcgtatgtttgttggccacataaatgtcttcttttgagaagtgtctgttcatatccctcgcccactttttgatggggttgtttttttcttcaaatttatttaagttccttgtagattctggatattagccctttgtcagatggataggttgcaaaaattttctcccattctgtaggttgcctgttcactctgatgatagtttcttttgctgtgtagaagctctttagtttaattagctcctatttgtcaattttggcttttgttgccattgcttttggtgttttagtcatgaagtctttgcccatgcctatgtcctgaatggtattgcctagatgttcttctagtgtttttatggttttaggtcttacatttaagtctttaatccatcttgagttaatttttgtataaggtgtaaggaaggggtccagttttagttttctgcatatgactagccagttttctgaacaccatttattaaatagtgaatcatattcccattgcttgtttttgtcagagttgtcaaagatcagatcgttgtagatgkgtggtgttatttctgagccctctgttctgttccattggtctgtatatctgttttggtaccagtaccatgctgttttggttactgtagccttgtagtatagtttgaagtcaggtagcatgatgcctccagcttttttctttttggttaggattgtcctggctatacaggctctttattggttccatatgaaatttaaagtagttttttctcactctgtgaagaaagtcagtggtagcttgatggggatagcattgaatctctaaattactttgggcaatatgggcattttcacgatatygattcttcctatccttgagcatggaatgtttttccatttgtttgtgtcctctcttatttccttgagcagtggtatgtagtactccttgaagaggtccttcacatcccttgtaagttgtattcttaggtattttattctcttagtagcaattgtgaatgggagttcactcatgatttggctttctgtttgtctgttattggtgtttagaaatgcttgtgatttctgcacattgattttgtatcctgagactttgctgaagttgcttatcagcttaaggagattttgggctgagatgactgggttttctaaatatacaatcatgtcatctgcaaacagagacaatttgaattcctctcttcctatttgaataygctttattctttctcttgcttgattggcctggccagaacctccaatactatgttgaataggaatggtgagagagggcatctttgtcttgtgccagttttcaaagagaatgcttccagcttttgcccatctagtatgatactggctgtgggtttgtcataaatagctcttattattttgagatacgttccatcaatacctagtttattgagagtttttagcatgaaggggtgttgaattttatcaaaggccttttctgcatctattgagatactcgtggtttttgtcatcggttctgtttatatgatgtatatgtttatatgacgtgtattgatttgcatatgttgaaccagccttgcatcccaggggtgaagccgacttgattgtggtagataagctttttgatgtgctgctggattcggtctgctagtattttattgaggattttcatatcgatattcagggatattggcctgaaattttctttttttattgtgtctctgccaggttttggtatcagaatgatgctggtctcataaaatgagttagggacgagtccctctttttctgttgtttggaatagtttcagaaggaatggtattagttcctctttgtacctttggtagaattcggctgtgaattcgtctggtcctgggctttttttggttggtaggctattaattactgcctcaatttcagaacttgttattggtctattcagggattcgacttcttcctggtttagtgttggaagggggtatgtgtccaggaatttatccatttcttctagattttctagtttatttgcatagaggtgtttatggtattctctgatggtagtctgtatttctgtgggatcagtggtgatatcccctttatcatttttattgtgtgtgtttgattctttcctcttttcttttttgttagtctggctagcagtctattttgttaatcttttcaaaaaaccagctcctggattcattgagtttttgaaggatttttcttgtctctatctccttcagttctggtctgatcttagttatttcttgccttctgctagcttttgaatttgtttgctcttgcttctctagttcttttaattgtgatgttagggtgtcaattttagatctttcctgctttctcctgtgtgcatttagtgctataaatttccctgtaaacactgctttagctgtgtcccagagattctggtacattgtgtccttgttctcattggtttcaaagaacctctttatttctgcctttattttgttatttgcccagtagtcattcagtagcaggttgttcagtttccatgtagttgtgtggttttgagtgagtttcttaatcctgagttctaatttgattgcactatggactgggtgatacttcaagggactatgcagaagcactgatggattcatgggatccaattccaattttttttttttctttgcagaatgttcgcatcttaccacatacagttctttacatggctgattcagaaactttcattagtctggaagagtgtcgtggccataagagaggtaaatatcaaaagaaaagcttttgcttytgtttttttatcatgtgccttccgttcggagttcaatattatacttgtcctgagagttaactgactttctgaggctctgggactgccacctgtagtatgcatcaatatatctatctttgaaccttgaggaaccctttctgcttcagattgatttctaaaccttgtagtgcaattgaaacaaattcgttagaaaggtgttgttctcaatttgagatgctttaattctccaggcactttttattattaaaacaggttgtatgacttggctattcaggccttttactgtattggaacatgaggtcccatttactaaagttatgtagagaaatggtgcatttttggcttgctgagggaaaaggcagaatgggtatccaagatgcgcacactcaggtcccaagttagacttagataatggattctcattgtctaatttgatccaggtgactgttgatgcaaatagtagttatactgcaatatcagctgaacagaaaggtacaatagcaagtctaaaattcagctgttactgctaaatttgacatcactgggrcaaaagcaatatatgaacagaggggaaaggcagactagtggtgcaaaagatcagatttataatttaaaagccaggaccaaaacaggtaaagtgtttgttttaatcaatgcttttagacctttatttagagcattckcgtgttaaatgacttaaatatttccagtatttgcttttttactttttcattctcagatttgactttaaatggatgatatttatcattttgctactgtatttttacagcaaggaaaagaactagtatggaaacagcacttgcccttgagaagctattccccaaacaatgccaagtccttgggattgtgaccccaggaattgtaggtgagataaattagcaacttgatgatttcttccttgcattaatgtggggtcctttggattggtgagttatttttagcttagaaccacatttctatttctgtccatctaaaatacaataaagtcagtcatatttaccatggcattatatttgccttatattaatgtttattaagttattgtacttctcatctcaaggttacctgtataaatatccagtagtcattcataagaggggaatgatctcattctgccttcctccaaattaggaagtatttgtgggcattttcagagttttgtcagttcaagcagtattgtgtttggtgggtaggggtgagatggggctgggattaggagcaaagctgggccttactaggagacttctgtttctctgctttggtaccactcttcaatgtttacagcatgaggttgtgcccctttccatgcttgattgctgctggtgaatttttgctggtttttattatttttgattcttttctgtagttaactgggggaggagagattctgttgaggcagtaatggtgcaatggttagatacctggattcgaatgccggctgtaccgcttagtatctgtatgactttgagcaagttacctaacttcatggggcttcactgtcctcatcaaggaagtggggatgatgacagtagtaccttccttggagggttgtgagaattaaatgagttaacacttgtaaagcatttacaatagagatacacaaagcagtaagtaaatgttagctgtcatttatgtattgtttttgagatggagtttcactcttgtcaccaaggttggagtgcartggcgtgatctctactcactgcgacttctgcctcctggattcaagcaattctcctgcctcagcctcccaagtagctgggatcacaggcgcccgccaccaccacacctggctaatttttgtatttttagtagaaaccgggtttcaccatgttggccaggctggtctcaaattcctgacctcaggtgatccaccgcctcagcctcccaaagtgctgggattacaggcatgagccactgcacctggctgctgttatgtttttttgttccaactcagtagtactctactgagaattgtcatttttaatcttcactgaaagatttttgatctgaatttgagtcttatacagtgaggtaaaaagaattttacatgtttacaaatgaatattatttgttcagttgctctagctktggtttctaaagggcttaacattttttttaaaaaaggagtttatttctttttggcctggcgtggtggctgacacctgtaatcccagcactttaggaggccgaggcaggcggatcacttgaagtcaggagttggagaccagcctggccaacatggcaaaaccccatctctactaaaaaatgtaaaaattggccaggcgcagtggctcacgtctgtggtcccagcactttgggaggccgaggtgggtggatcatgaggtcaggagttcaagagcagcctggctgacgtggtgaaaccccatctctactaaaaatacaaaaattagccaggcatgatggtgggcacctgtaatcccagctgctcaggaggctaaggcaggagaattgcttgagcccgggaggcagaggttgcagtgagccgagatcacgccattgcactccatcctggatgatagagcaagactctgtctcaaaaaaaaaaaaaaagctaaaattagctgggcatggtggctcatgcctgtaattccagctactygggaggctgaggcaggagaattgctggaaaccgggaggcaraggttgcaccacttcgctccagcctgggtgacagagtaagactctgtctccaaaaaaaaaaaaaaaaaaaaagtttatttctttttttatactagtaatagttatttttagaaaaaaaaaattagaagattcagataagcaaaagcacctttaagcaccacagagttaaccactcttatgatgttaacctctatttatatatgtatgtaaatataaaaaaccagaatacaattttytgtagacttgtaacctactgtgttagtctactagggctaccataacaaaataccacagactgggtgacttaaacaacggaagcttattttctcacagtttgggaggctagaagtccaagatcggggatggtctctctgaagcttacttacagctgctctctcactgtgttctcatgtggccttttcttcatacataagcatgcttggtgtctcttcctcctcttctcaggacactagtcctgttggattagggtcctacccttgtgacctcatttaatcttaactatctctttaaaggccttatctccaaatatagtcacatggrgggttagggcttaaacatgaatttggggtaggcagtagggagggaatgacacagttcaatctgtaatatctacctgtaaaattcagagcatattacaaacatatttccatgtctataaatatatatttgtcatcattttaatggctatattctatgataccaatgtaacttttaatctgaataccagtgtgggacattcaggttttttctttttattttctatttgaaattatgtgataaaatacttgggtatatatatactttatataattgtcaaatatttttagggtaaacttaaaaattggaattgctgtgaaagtgtatttactacccccccaactttttaatttgaaaaatatggagaagttgaaagaataatagaayagcatgataaatacccatataccctttatctagtttagcagttgaaaaaattttgcaacatttattttttctcactttgcttataaaaaatttctttctgaaccatttgaaagttaaatggcaaacatcatgacactacaccctaaaactgtcaaagctgaaaaacttttactcagatagtggcttgttagcttaatgattatcttagtgacctaaactgtagttatctagtttttactgactctattggtgaaactgtttaactttttctctagtgactccaatgggatcaggtagcaatcgacctcaggaaatagaaattggagaatctggttttgctttattattccctcaaattgaaggaataaaaatacaaccctttcattttattaaggatccaaagaatttaacattagaaagacatcaactcactgaagtaggtaagttacttttatttatcattaactgctcattttattgattaattttgttttctttttaattctggctagttggtggatattaggttcctttgggagaatctgaattaagtacacctgtcactggagatgtggctaattcaaacaggtgattcacagaggccagtgtgatacatgtttggtagaattgatttactttttaaattattttacttgcattaaagcccaagagaaccagagatgaaaaatttttcataaatactctgttgatgataaacttgtttgtatttagttctgaattttaaggaattcttgctctaatagtttatttcattttgctctatttttgttttgttaaccttttttattctagtaacaagcattttagaagtttttagaakacgcgggttagttctttgtgaactaattagaaagatgggaacaagtaaagtgaccctgatgagtcttaggaaatatatgagttaaggcaagtctatcaagcaaggggtgtgctgggaaacatcctgcaggtagtgtggatggagccctgaagtgaatttgaagaggtaaagggttggcttaatgtctaagcttggatgggaaagcttaacttaatatagtaaacaacaaaygaattactcaaggaaagcagcgtttagccttttatctacatctgcagatggactgattgaattcacttcattcattaaaaatcactgttggcataaaaactattcagtggtaacacctcatttttgcatagatcagccagcctatagagataaacctctgttatttgaaatgggacttaaaccagctggagtaaaaaattgtgtagcagcaaaggtaaaatttgttttactgatgaggaaaaaaagggggtatacacattgagactagtttttacaactatccctgacaatgtggaaaaaaaaaaaaaacttgcaagtcattggtggatgggaggggaagcacagaacaagaggcattagcagcaaagactcagccgggaacctcttaataatgtggaagagggtggtcaggtcaaagtagatggtggaaagtctcaacagccagctctggtgtgacacagggtagtgtagctattaagaatgctgacttagaaatgaaatcagtatgttgaagagatatctgcactcccatgtttattgcagcactgttcacaatagctaggatatggaattaacctaagtgtccattagctgatggtggataaagaaaatgtggtatacatacataatgaaatactcttcagccataaaggacatcctgtcatttgcaccagcatggatgaacctggaggatgttaagtgaaataagccaggcccagaaagacaaatagtgcatgatctcactcatgtgtggaatctaaaaatgttgctctcatagaaatatagagttgaatggcaggcaccaggatctggggtggttgggaggggctttggggagatgatggtcaaaagatacaaaattcgttttggaggaataagttcttgaggtctgttgtacaacatggagactatagtcagtgaccatatattcttttttttgtttgttttggagacagagtctcactttgttgcccaggctggagtgcggtggcatgatctcagctcactgctacttctacttcctgggttcaagggttcaagtgattgtcatgcctcagactcccgagtagctgggactacatgctgtatgcaccaccatgcctggctaattttttttgtctttttattagagatagggttttaccatgttagccagggtggtctcaaactcctggcctcaagtgatccacctgcctcggcctcccaaagtgctgggattacaggtgtgagccatcgtgcctggcccatatactatattcttgaagaatgctaagagagtgactgttaagtgttcttactacaaaaatggtaactgtgagataatgcatatgtgaattagacttagcccttccacaatgtatatatacttcaaaacatgttatacattgataaatacatacaattttatctgtcagttaaaaaataaatagaaggtagtcaaccttaaaagattgcaggcttgtagctactctagttctgctactttctggctctccagttagggcaagtttttcaatttttctaaacctccattttcctcatctataaagtggaaataactaacattgaattcacagaattgtgaagattaaatgaaatgactttcataaaacgcttagcaacagtagattgtagctagatgctagtgttggcctccaccctaggcaggctttactrtgtgtcacatgggcccttcatctgcagtgtggccttgtagtttgtggggggaatagtagggttctaagtgtccttagctcattcagaagccacatgccagaggagcatacatgtgtctgggcttgaagtgacaattaacgatggccaatgtttatggaggtactgtatgccagatactgtgctgcgcagcacttctaatcttcaccacagctttgccagacagaattctttatggaatatttttgatgaggaaactgaactttaatggcagtagagagttaaggctcttagggtatgtaaatagcagagttagcagaaatgttaaagctattctaaattaaggatgccaaacttcctttgggaaaaggtcagatagtgcccttaaaactgacccattgttaagtgtaaaggcaaaatgaattttaggagcaaatgtggctatgtgctgagcttatgtgattttgtaataacataatgagacttgatattggtaggctagctggagcgaacaaagttcagcaaactaggtctttttcagagttggtcaggtggttagcaaatagtaggtctgaaactcaaaggaatggctgtggtcagacatgttggtttgagaaccattttgtgtgttgcctggcagtctgcctgtaaaagcatcaagtgtcattgaaggccttggagtaagccagtccagggcaacatagcccagattctgggaagatttatggcagcaaatttagtacaaggaaggaagaagatgatcaatgtgttgatgttgacgagatgactatctatattcaattggctcataatgtagaactcctacattaattttattcaggctggtatggtggctcatgcctgtaatttcagtactttgggaagctgaggcgggaggatcgcttgagcccaggagttcgagaccagcctggacaatatagtgagacctcacctctacaaaaaaactaaaaaactagccaagcatggtggcacgcacctgtagtcccagctacttaggaggctgaggtgggaggattgcttgagcccaagaggcggaggttgccgtgagctgaagtcacgccactytactgcagcctgggtgacagagtgagaccctgtctcaaaaataaataaataaataaaaatttattcagcatgttaaaggtgacataactggatgtagattctgtctcagtgacattccagaaaaggtatgaagaatacatatacagtcatatgttgcttaatgacggggatgagttctgagaaatgcatctttaggcaatgttgttgttgtgtgaatgtcatagtacttacacagayctagatgttacagcctactatatgtgtaggctatacagtgtagcctattgcccctagactacaaacatggacagcatgttactgtactgaatactgtaggcagttgtaacacaatggtaagtattggtgtatctgaacatatctaaacattaaaaaggtacagtaaaaacatggtatgaaagacagtatacctctatagggcacttaacatgaatgggacttgcaagactagaagttggtgtggggtgagtcagtgagtggtgagtgaatgtgaaggcctagccctgtatactactatatagtttataaacactgtatgcttaagctacattaaattaattgaaacatttttgtttggccgggcacagtggctcatgcctgtaatcccagcagtttgggaggtccgaggtaggtggatcccttgcgatcaggaatttgagacaagcctggtcaacatggtgaaaccccatctctactaaaaatacaaaaattagctgggcatagtggtgtgcgcctgtagtcccagctactgtaggctgaggcaggagaatcgcttgaayctgggaggcagaggttgtagtaagccaagattacaccactgcactccagcctgggcgaagcgagactctatctcaaaaaaataaaataaaattgttctttaataataaattaactttagctagacaaaaaaaatttccatttatatccttattctgtaagcttttctccacctttaattttttttttaactttttaagctttttgttaaaaactaaaacacagtcacacacattagcctaggcctatacagagtcaagataatatcactgtcttccacctccacatctcgtcccactgcaaggtcttcagggcagtaatacatgtggagctgtcatttcctatgacaacagtgcctccttctggaatacgtcctgaaggacctgcctgaggctgttttacagttaacttttttttttttttaataagtaggaggggtaacctctaaaattacaattaaaagtataggatagtaaatcataagccagtaacatagtcattcattgtcattgccaagtatgcattgtacgtgattgtatgtgctatacttttatacgactggcactgcaataggcttgtttacaacagcatcaccacagacatttgagtaatgcgttgtgctacacattaggcagtaggaattttgtagctctgttaatcttctggcaccactgttgcatatgcttactgtgcgtgtcaccacgcctggctgtccttgaccaaagtgttatgtggtgcttgactgcataatcataacccaagtgagtatgtgaggtgttctgtgagagcagaatgggtagattgctgtaggggttctgccagtgggagggatcaaggaggcttccagaagcaggtggtatttaagcccttgaaggatgggaagcatatgagagatatggatgagtaatatcactggctgaaggaacatagaaacacaggcacagagccaggaaatcccagagcatgttggagaaatagtaatcattttgcaagcaaaggttatgtgcagggaagtcatgggaacaaagggtggggcgcattcaggccaggctaaagagtctgggcttagctcctgtacacagaaaatggtagctgttactcagatgtcatcgagcagaggtgaatgtggccctcctgtgtggggagacactggaagcgggagaccactttagagtccaggcaagaaataacactagggcatgaggactagggaatgaattggaggaaatgaacaaatgattagatgtgaaagagaagggaagcctcagtaattacttttgagttttgatcctaggagacaagggtgatggtggtgcagagaccagaaataggaacactgggacaggaggagcgggattgggagaagaaattgggaaaaatcaaaccccattagagatgcttgttttggctgttgattcagtgctgctgctaaaggtcatatggccaaaccttttgtgtgctgccttttttgtccagagaggtgacatagctgtttcctgggcagtactctgtcctctgtccacctgagcatcctgggaatctttgatgaggccctgatatgtggcactggttgaagctaggaccctagttttgtcagtttataagagccaaaatcttgagcagcagaaacccttttgtgataaaattgctatatttgttagatcatatttgcattatagtgccaagtataggaatgagaaaactggaaggaaaaacaaccccagaattattgtgctctgtgaagctttcttataggtgtcctttcctgagctgcttgatgtcagcagttttggcttattccaaggcatcattttcttctggaaattgaagctttgcccagcttaaaatggccatcttcattctttcacttgctatcttgtgtcctaattttaggtagagttggccttccatatccatgggttctgcattcatggattcagctaaccacagatcaaaaatatttgagggaagtgcagcaagaagccaggtttctaaacacaggagtggcataatttgatagatcttttcaaaataacactcttgctatgatgtggtgatcattttggagtacaagagtggatgcaggattagcttgatttagccattcagtagtgtatatatatttcaaaacaccatgttgaacatgataaatatatgccttttaaatttttcagttaaaataattttttttaaaaagtatatgcaggagacacagactgttgtagtggttaaggaaagaggagatggcagcttggagcagggcagtggtgagtggagttgaagagaagtgaatggattcaagatgaagtttggggctgaatggacaggatgtggtgactgatgagatgttaggtgttgagaatgagggaggtgacagcgatgtcatgcgggtatgtggctagcgcagctgtatagtaccattgactaaggtgaagaagatttgaaggtgcgggttggargatcagattatcagttctgttttggacatgtttggaatttgagatggagatattgattatagacagttggatatgttggcctggagctctagagaatggtctagaggaaagatattaatttgggaatcatcaggtaattaatggtgattgaagcaaaagggactggcttcagtgatttgaggaggagggccggggaggaggctcagtagtgcatgttgattgtccagggttggtactgctgtaatattattttgacatccctcccttctgctaatgcaaaggctttattgagactactcagtaaggatctccttgagccatttcttagcttttgttttaaacacttcatttgtacagtcttacatgggatgtcaacataaaaataaagcaggtaaaagcagagcctctaggttgaagggtgaagggagcatgttaggccttgaactgaggttgcttattctcctccacctacactggaggcatctttggaacgctttgcccaccaaagcacagtctgaaagccccagctgcaacagaggaggggagagaagcttccctccctggcagtgctcatgcacttcttcctctaaaccttcatgtaatccagggaaggggctctagactcagagcagtgcctggcagctctacagtgcctggcagctctacctgtctgtaccacagacaggagagcttgagaaagcagacctagcactgcygagcgttggcaagatggacttcagcttgagagccagagcctctttgctcctttgagaatgcttgaggtggttagttatatagcaaacagttgactcacacctgggatcctccctctcttttccttttacaaatatccttctgactttcttctaggtgaagcacaaacctgtaacattgccttttggggcacagtgattttctggatttgagttttatttgcggagagtcccattagaaaagctttcctattgatttttacattttagggtcaagagaggaagttctgaagaattcagttgcctttgctctttgaaggagaggattggaagtgtcctgtgttttccatagctcagtaggcacagttctttctggcagccagttctggggtgtgtatttaattttactttggtctggtctgatctagcttctgtaatatggatataatttgcatgttaaatgtgaattttggaagtattgaatcctcacagactttttaggaataaaacaatacrtaacaggttgttacaggcattaaataagttaatttctataatgtacttagaacggtgctctgtactagtgtttgttgtgagattggtgatctggtgatctagcttgtagattgttcaggttctttctgctccctgctttttgaacctttaactacttgtcttgaattctgccagccaccaagaggggtaaaaatagaactttaatgacttgtcagattccaaaaaagtgtgaagaagaacaaagttttaaaattatctgaggacatcatagagagtcttgaggggtcataggcagtaccaggtgtgaagcagagagaatcagtgctgaagctcaagggattgaacttgttctgccttcgaagttgcccagcccttgagaaagcagaagtgacaggaagctagtgttaaaaaaaaaaaaaaaaagcgatgctgacatctattcaagacaatgaggcagactttatttgggagaccactgtgatggggttttgcactaggggagagagatcaggctcaactccaaatgcaccaaccacaaatggggatttatagccaaggaggagggtgggggcttggtggatgaaaaattcctaagaggatggggcaattctttgctaaatttacctaacaagattattactggcaagaacagtttcatcctattccaaaaccaaagacatctcttggtggacaactacagtagttaacttgattatagttgccaatcctacatggcaggtcagtttatcctgttacctaaggttacattttgtaaccagcttatcatcttgaaaggttcaccagkaggttacactgtttaaagtgccttataaatacttttctggaattgtttttaatggttgtggtaagctcctgctaatgtatcaacttttggaaaattctagaataaaatctgtagtcagattctatggcgggtggcccaraacattgggtccttgatgatcctttacctatgaattggggggaacccagaacctttcaggaaaacttggcattgctccttattcttccctcatattttaggcctttgaattttgagtgtcaaggagttggagttgtaccttccctctgttatttaccggtagcaccaggtagtctgttggttaaatacagagccatctgctctatcaggcagccagccttggctaaggtgggtttgttctttaagttggggtaggggaaagtgattctactttctagggttgtgtattaggagggggaagtgttccattagctgagaaccaacccactagagaagatgttgaaagaacaccactggagaagatggtgttaactggaatgtgtgactgaggcgagaatctccatcattcgaggtttactgagccagaggttgagggcgtatccgggaaaaacactagtcacaaacgagtggctgtgtactctgaagaggttttcaatacatgtttttaaaggagagaaggaaggatggggaaggataggcatgaggtgaatggttacattcctgtgagactttagttagtactcagtaaatctacactttacataagataaggtgaaccttttgaagaaaggaagaaccatttatgcagatgtctcagagtaggtgggtgaattactgatctcttgtttttgtgcagcatctgggaagataagcttgcaatggacattatcagtgtggaattgaacagattacagacctagagttacaattgacatgtccttgtgttatgggaggatgtacatcttaaaggttttgaggccagcaaagattttccttatgaatgatttgtgggagcagtcatctggagatgcctaaagccttttgcctttcctggtcggggggaggggtgtgaggcggtaggtctggctaatgtataatgctctgacacagggttgtgaagtagcaatattaatttggagagaggatggtgcttcgcttgactcagcctctaggctaaactttccctttggcataaggagtttggaggtcctgagatttttttaaaattttcctttacattgggtatgtgtttgttaaatgaatgggagtggttgcctttagaatattcaggtaggatgtttagtggatgttgtaaaagagcatctagagcttagaaaacaggaggaaaggttgagatttagaagtcatgagktttctaaaagctaaagccctgagtgtcaggagatgtgggttttaatgtagagtctgtcattatattgtcctggggtagtagtcacttctctggcattggcagtccttgtttgtaaaataaaactctagacttgatctcacaggcctctcccaactctgaaactttgttctaaagaagaaaatatattctcttaaaatttcgtgggctagtctataagggaaaaaagatgctttagcaatggtttggggtatatgatgtcatgaaagtaatattctttttactgtccaagtcagtaatttactgtgtagagaattggaaatggaccagaggcagtttcccagaataggtcattatttggtgttagtaattggtcattcacgcatctgcataccctttgtttccttaagtaactctcctttctggtaaccaccttaggtttgtcaaggtggaagtcatgtggtcaaatcaaatggaaacacaagtgtgttaggtattagattcattttcctgtccccaaagyacccgtttggtaatgctggcagaagacatacatgcggccaacaatcataggaaaaaaagctccacatcactgatcattagagaaatgcaaatcaaaaccacaatgagatcgtatcccatactaggcagaatggctattaaaaagtcaaaaaataacagatgctggcaagtttgtggagaaaaaggaacacttatacactgtcggtgggagtgtaaattagttcagcyattgtggaagatagtgtggtgattcctcaaagacctaaagacagaaataccatttgacccagcagtcctattactgggtatatattcaaaggaatataaattattctgttataaagacacatgcacatgtatgttcattgcagcactattcacagtagcaaagacatggaatcaacctgaatgcccatcagtgataaactggataaagaaaatgtagtacatatgcagccataaaaaagaatgagatcacgtcctttgcaggsacatggatggagctggaggccattatcattagcaaactaacacagaaacagaaaaccaaatactgcatgttctcatttataagtgggagctaaatgatgagaatacatcgacgcaaagaggggcacaacagacactggggcctaccagagggtggagggtgtgaggaaggagaggatcaggaaaaataactaatggagaatgggcttattacctgggtgatgaaataatctgcacaacaaacccccatgacacacgtttgcctgtggaacaaacctgaacatgtatccctgaacttaaaaaaaaaatcaaattgatagtctataaacaagctgccagaggctccagtgaaacctgggagctgtgggcagagcaagtaggctgtctctgttacactctgccacctcctagcggtagcagcttttagttcctgtgtcacagaattgaacattttcctgctttgcaaggaactttcaaaggctaattcgcctttactctcacctgcttccgtggaggaggtgaataaagcctgtatttcagtgatgtagtagtttcttaggctgctgtaacaaagtaccccaaatttggtgacataaaacgagaaatttattctgcacagttcaggaggccagaagtctgaaattgagatggcagtaggggtagtgctaccttgggaggctgtaggggagagtctgttctttttctcttcctaccgctccagtttctgcttctgtggtcacactgccttttcttctctgtctctcctttgtacatctttcattatgaggacactgtcattggatttagagcccacstggatagaccagatgatttaatcttaagatccttactaacatagcgagaccccatctctaccaaaaaaaaaaaaaawtttttttaaagatcctttttccaaataagcttacatgcataggttccagaggtttgatgtggatatacctttggcatgggcagggggcactgttcaccacactataagtggttagcgccttttctctcctttaaaaaataaaaaatctgtaaattctcactgctgctagcacagctctgtgtaaaccagtgtttttttttttttgttccctactgagagccagcttgcaccttggtctaccaagagttgctgctcagtacatagctgcttcrttatttgtgttgattgcattatttattaacacaaatagccatttagtttttttaatagaaaaaataattaagattttgcataatgtttgtaaaaaatggaaaacttgatacagagatcgaagaggatataaaataagataaaaaataaaaaatggaaaatttgatagcttaagccactaaattgcccttaaggtggagtgcaantcagtaacatttcattttgcagcatgtataaaataatttctgttttaaggctgtctttaactgttgctcttcatttctctgcaggtcttttagataaccctgaacttcgtgtggtccttgtctttggttataattgctgtaaggtgggagccagtaattatctgcagcaagtagtcagcactttcagtgatatgaatatcatcttggctggaggccaggtggacaacctgtcatcactgacttctgaaaagtatgtcttgtgtgcttctgatttcgtctgtgaatgaagggaaatggtctcaggttttgtcactttggggttaacaatttaaaaaaygtgtttaaagaattattaagataatagttcattccattttgtagtagacattggctaaggggcttactgaacataattctgcttacggttgaataattacatttttatatatattgtccttcaagaacttccttgagtcacattctccttaaaatttgacattgcctgttgatctttcctttgacagatgtggtactctgtgtgacctcaatgtgtcacctcctttctagtttcctcctttaaaggaaacacatggttagagtgtatctttatggcaaaacttctcagagcttctaatatgcccagtgctgtggaaatctggaaggagaatagcattacctgtgacagttcccaaatstgtttggtcacaaaacttttttccacagaatgtcttgcaagtcgtactggtttttggaaattctgtattagatcttttgaaaggctttttcaagcttaaaaattgtggatcttttttgttactaaggcttttgctttcaaagataaaaatatttgctcttctgtcttgggagccattacttcctttccatcttgaatgaaaatacatatcattttgagtttgaaacaattaggtggacataaatatcatttgtttccagcaggaaaatcagaccctaccccaccctcaatgcttgtaaacactactatttgtttcccactctgtttaatatttgcatcctagagtggtgacatggggacagactgttgcagatcagtatctataagaataatgtaagtcatcctagttatagtctctcttctggttatctctrtgagctagatctgggaaaatagctaaagttgaggtccctggactgccagggaggaggaagagaggaaggccaagtacgttgaatcccaggcaggatatcaaacactggattttgtgcatacatacactgaattcttggtggctatctaagttatttcccctcttgcctaatttttcctgtgtctttgctattaacttaaattgtgtacggatagggcaatggtgattcaacatacagtttacctttgaaatgcagatacctcactcagacttataacatctgaggtgctagcttgtaagtgtagctatttgtatatcatctactttttatacctaataagagaaacaccccccaccccaatcattactcttcacatgacccattaattttaatgtggtcttcatactctgtcagtggttaagagaaaccattgagtaaatgagggctccattttaataaagtccagataacccaactgacccagtgccccaaaaggaagatgtataattctttgaggcaagattgacaatgtatattaacaattctgtaccaaagaggaaatgtgataaagttttaagagcagcagaggacttcagaagacggattttgcccctcacaaacttgttttactactagctagccttattactttagtcacttaacctttttgcgtcttagtttctcactaatccagtgactcttgcccattttatagattcagatgttggaagcatgatacaatacttgtttatcccctagtggatgttcactatattatgctttattacttttatcaatgttgtattttcttttgtaaggatatttcattttttaaaaaaaccaggcaaatataaacmaaaacaaagcatgagtttttaccatcaaattaagctgaactctagactcaaagcaataaacaagacaaaaaaataacataatcatattttctagtggactagacataaagctaaaacttctagagttaataggtttttaaaattatcctctgagtgcagtggctcatgcctgtaatcccagaactttgggaggctgaggcaggaggattgcttgagcccaggagtttgagaccagtctgagcaacatagtgagaccctatctctacaaaatgtttacagattagccaggtgtggtggcatgtatctgtagccccagctccttgagagactcaggcaggaggattgctttatcccacgagtttgaggctgcagtgagctatgattgtgccactgcacttcagcctagctaacagagaaccctatctctaaaaaaataaaatcaccctccattattatatttttaatatacatctttcagaatttgacagctgaagtcggggggaagagatgttaatgtaaacaatagcagaaggcttcgtttagtggatatctttgtgtatattaataaaattataacattccttttaaggaagtcagaaaggtaaggaaactgtactttctaataaccggatatgggtttcagaaatcgttatggatgtgcattgcccctttgtatttgtgactgaaaaaaatggtggcttctcttgatctgccttgtgcattttttatgtattaattttgatttttgaccctattttactcacctatgagggtgagcctcagattaaccataggctgctaaaggcagcagcctcccgtcagtgaatcaggaggattttgcttctatacttaaaaattttaatgtttcatgagatattgccacttttctaaattttccaggaaccctctggataytgatgcctcgggtgtggttggactgtcatttagtggacaccgaatccagagtgccactgtgctcctcaacgaggacgtcagtgatgagaagactgctgaggctgcgatgcagcgcctcaaagcggccaacattccagagcataacaccattggcttcatgtttgcatgcgttggcaggggctttcagtattacagagccaaggggaatgttgaggctgatgcatttagaaagttttttcctagtgttcccttattcggyttctttggaaatggagaaattggatgtgatcggatagtcactgggaactttatattgaggaaatgtaatgaggtaaaagatgatgatctgtttcatagctatacaacaataatggcactcatacatctggggtcatctaaataataattaaagtggctttcataatatgtaacttttgggttctgcctttttcagaaaatggaaacttgggccatgtgtatttcaaacaaaaataactttagatatatcttttttgtagctttgattgatgctctaagatcacatgagggtagtatttaatatattagatgaaggacaactttggacataacactgactaggagttgagagcttttgcatcaggcagaagcaaactgattatagttgtgttgcaccagatcatgtagctgctgtgtaacatgaccttaaatagtcttcctgcataggaagagcaaaagggtattcatcaataggatatagatttaagacattccctgactaccccttgcgttgttaggtgatgtcttttagcagaatcatgaagaccttttttctcccttaataaaggagaaaaatatactgatggctggagaaatttttctctgcctttcagttttatgaattttttcagaagtaacaatattattattgactttttacttatttgataaaaattaaagaactatttttgttttggtcagataaattgacaagactaatcagtattttattataagtaaaagatttttcttctttccttaaaaatatttttttttcacctaggtctaaatagctaactaactggtagaccagagtattacatcatcttattttggttttataccaataaaacatagcgtggaactcattcaggtaatgttttgcatttcattgcttttggatgaacaaaggaagtaaactaatcctttataaatgaaaacccagaatagttggtatgtcagctagtcattcctgtcatattcccagtagaatgattttcaagtttgaatttctgtacaaatatctaaataagagatgtgcagagagcaccaattttccttcaatatccattctttacttttcacataatgatagaacctttgatttttcaagtgggtatgcctcctagaataaagactacatttcccagtctcctgtgcaggtatgactgtgttctggacaatggaatgtgaggggaaacgattttttgtgtccttaaaatggcatgaccatttatttgcccctttctccatcctgttgcttggaatgtggatctggtagtgagccatcttggaccctgaagaggaggcaacacaccattgtagaagaaaaacaacagaaggatcctggtccctgtacgacctcattgaagaaacaccataagtggcgtggactatctacctccagactgttttacaagagagaaattagcatattccatctaatacagtatgatgtaactaatgttacttttgtaacagtcagtggtttgttctaacaggacagtagaacacttgcaaggtaagtaaaaccaaatgtattagcattattcctgcttttccttttttgtcacttttatcctttttttaaaactgaaaatatttttctcttgctatttatatatatatgataaaaatgcttggaagagtcctttaatttatggttattctaaatcctagttcctgaggcaagtccaaagaaaaatgtgtcaaaacttttcatctatgaatatttatatttagctcttgctatttagctattatcaaaatacctcaaaattttagtccttgaatgtgctcatatagcccataaggcaaatattttttaaactttattgtccctgatattaaccagaattggttgaatagtagaggaaaagggatttttaaaactgaaaatatgaacaaaatgagccttagaattgaatggattattttaaacaaattaatactcatataaaatgttttgctgcttctcaaagagtctgatacagggtaatttcatacaatatttgatgttgttaaagcattcctttttatagctgagcctttggagcttgttatgaacagtaaaatcatttagtcacatggttgtaaccttagtgcaaagtaaaaagggaaaagttgacctaatagaaacaatagtagtattgataagaacaaaagtcatcctccctgcctctcagaggccctgaagtcctgtgaggaagggaaatagtaatttaaccaaagttaaatctgtgtaactcatttattacaattttgaaaggcttgtcttagaagcattaaaggagtattagctaaaaacaaactaaattcctagagatgacaatcattgtagtcctctgtgaaactgaaaatgatcacatgaaaaaaatgtgagcataaaaaagagaagtaaaggtgtaccattagcctacatactgagctgacgatcagatcatagaatactttatttaatcaagacatttaaaaatacttatttcatctacatactttcaaagcaaaataatttctggggctagtttcctttgtataaggcttaagcaaggaatatatttccatgccctttgatccaagtaaaatctaaggaagagggaaagtaaaccttgaaattaagacctagaaatagatccacccttgcagactgataaaagtgggcaatctagtaggccagttcacattacagttatctcagttttgcttaaagcaaaccctaaccctcaacctacgaggccagatagcaaaagacgtgcaactggtttatattgcaaatttaacaaagtgaacatgcaaagaattacaatagaaataaacttttacaaatctgagaactttctttttttttgagacggagtcccgctctttagcccaggccggattgcaatggcacaatcttggctcactgcaagctccgcctcccaggttcacgccattctcctgcctcagcctcccgagtagctgggactacaggcgcccgccaccgcgcccggctaattttttgtatttttagtagagacggggtttcaccgtgttagccaagatggtctcgatctcctgaccttgtgatccgcccgcctcggcctcccaaagtgctgggattacaggcatgagccactgcgcccagccacaaatctgagaactttctatgcaatctgcagaaatttttaagaatataaatatgcttttgtcattttatacccagtctggcccaggtttgcactgccataaattcagttttaatgggaacagaagactccagatcctcttgatgggaagaaatcatgaaattttagatgattgacttggttttcatttgtagaaactgggtataagttggcttaatgaaaatcctaaaataataaaataagcattagtaataatatccttgttaaatgaacaaagtgaatacgatataaagaatgtgataccagaaagttactttaatattgaccctatatagggaagaataatcaaatatttgcaaaatatgttatttttgttttatatatttaacttctaccctatgccacaactgaagacaggttacaagaacatgtgctactacaaagtaggaaactggcagaagccaataagtatcacttaatattttggtatggaaacttttttttttttgagagagttttgctcttgttgcccaggctggagtataatggcacaatctcgactcattgcaacctccacctcctgggttcaagtgattctgctgcctcagcctccctagtagctgggattacaggcatgcgccaccatgcctggctaattttgtatttttagtagagatggggtttctctgtgttggtcaggctggcctcagactccaacctcaggtgatctgcctgcctcagcctcccaaagtgctgggattacaggcgtgagccaccgtgcccagctggaaactttcatttcttaaaacagatttataaaagtttttgctatatagtgactgttagccagtaaaaacagggaagattgattaatttagaagaaattgaaagaaaatatatttattaatgttgcttttaaatgcaaattatcagattgaggagaattttgagaccattgacatttttctaattatgactaaaatttaatcactatacttaataaacatactctattcaaggtcttgtaataaaattatagggaggaataaaacataattgaccccagcgacatcagcaaaaatgggtggactaggaagctgcaagcttttgtttgcctatcaaaacattaaaaaaaaaaaagaggccgggcgtggtggctcacgcctgtaattccagcactttgggaggccgagatgggcggatcacgaggtcaggagatcgagaccatcctggctaacacagtgaaaccccatctctactgaaagtacaaaaaaattagctgggcatggtggcgggcacctgtagtcctagctacttgggaggctgaggcaggagaatggtgtgaacctgggaggtggagcttgcagtgagccgagatcgtgccactgcactccagcctgggcaatggagcaagactctgtctcaaaaaaaaaaaaaagcaactgtctgaacgaaccttgttagagctttggaaaacagtcaaaggtttacagcaaccaaaagaatgcccaatcatctgcagaatggtaggaaaatattgtgactttttagtggctcttgcccgagcctctccctacattgtggcagtcttaaagcagcagaagcccagtcccctcccttgaactggagaaaacatgctagaccttttttgcaaattactgtgtacatttttttctaacctgtctgcggatacttgaaggactgacacaaggtcacatctttgttttgcctaactggtagggtgggcactgcttacaaaagctgcaaagaaccacaggtgcatggggcaagaggttatgggtgtaaacataaaatagaacaactaaggcccagaggagaatctggggtaagactttgggaaattaagaacagttacatatacaggggggatttaaaatgcgacatgcatgcccagggaaaacacttgcccggaaagttctaagacccaagctttcaccttggtctggtccctaagcccaaaagcaggccaaagtaagtattgaaggattacctgggacaaagctgatttgtaaaatctaggattgctcctagcattcaagggaatttatgtcaaaatagctgaacgtgacataaaaggaagagagacttcagtgatcacacacagaaggaatagtcttttataaaaataatttggaaaactctcaaaacaaatggatgacagcttttaaaaataaaaaaacaatgaaccagaaaaccgtggggaaaggaaagaatctcatacctagagttaccatattataatagtgaatatccaactctcaaggaaaaaaatcacaaaccatacaaaggaacaggaaaataatgcgcattcaaaagatcaaaattaattgaccttgtcctaatgaaggacattaaactagacatatactttaactcaaatatgcccaaagaactaaaggaaaacatgaacaaagaattaaagaaatcaggaaaatgataaatgaacaaaatcagaatatcaacagataggcattataaaaaaattctggcagagaaaagtataataaatgaaattttcactacaggggttcagcagcagatataagcaggtagaagaaagaatcagcaaacttgagatgggatcactgaaagcagaaacaacaaatcaagcctacatagttttaaaagatacatatcacacacaaagaagtgaagaagatatggtgcatttttgaaccacaacaggatgtagttagaaatcagtaacaaaaggaaaattggaaaattcacaaacttgtggaaattaaacaaaacactcaaccaatgggtcaaagaagaaatcacaagggaaattaaaaagagaaaaatgcaacataccaaaatttataggatgcagtgaaagcactgctaaaagggaaatttgtagacataaatgcttacattaaaaaacaaaaaagacctcatgtcaacaacctgactttgcagcttgagggggaaaaacatactaaatccaaagctagcagatggaaggaaataataaagattagaacagatataataaattgaataaagattagaaacactagagaaaaatcagtgaaactacaagttctttaaaagaccataaagttggaaagcctatgcctagatagactaagaaaaaaaggaagactcaattgctaaaataaatgaaaatgggaacagcactctagattctagaaaaatgaaaagggttatagaagaataccttcgacaatctagatgaaatgctcaaagtcctagaaatgcaaaacgtactactgctgaactatgaaaaaaatttaaaaatctcaatagaactataaccagtaaggtaattgaattagtaatcaaaattctcctggaaaaaaagcactggacctgatggttttcatttgtgaattctaccaaataagaagaaataaccccaatcccttctaacttttcccaaaaattgaagaggaaggacgctgcctaattcattctgatgctgaagccagacaaagatactacaagaaaagattacagaccagttattccttatgatcgctgattcaacaattgtcaatactaggaaactgaatttagcagcatattaaaaggattgtacaccacgaccaaatggaatgaattcctggaatgcaaggattgttcaacatacaaaaatcaatataatatactacattaacaga

SEQ ID NO: 95759 - DNA, 30934 bp, Homo sapiens
aaaggacttcctgaagctgggttatttataaagaaaagaggattatttggcccgtggttatggtgagcgagaaatggaaacaggcatcacacagcaagaaaggagtaaagagagagggtagggaggtttagtttttagttttttcagttttttaaaaaagttattattattagatcttgtgggaactaatagagcaataagtcatttatttctgtaaggacagaaccaatcctttcgtgaaggatctgcctctatgtctcaaacacctctcaccaggccccacctctatcgctggggatcaaatttcaccatgagatttggagggaacaaatatacaaattatatcatggttcttaagagaaacagaatgaataggatatatagatatataaaagaggagatttaatatgggatgatttggctcatgtgattatggaggctaagatgtcccacttctgctgtctggaagtgagataaccaggaaggttggtgatgttattcagtttaagtttgaagatctgagaaccagggggacgtaggaggatggttgctggtataagtcctggagtttgaagacctgagaaccaggaactcctatgtccaagggcaagagaagatggatgtgaaagaagaaagagagagagaaatgccccttcatctacctttttgttctattctagccctcagtggattggatgatacccacctacactggtgagtgcagattttctttaatcagtttattaatttaaatgctaatctcttccagaaacactctcacagacatgcccagaaataatattttacaggttgagtgtcccttatccaaaatgcttgagatcagaagtgttttagatatcagatttttctaaattttggaatattttcattatacatactagttgagcatcccaaattcaaaactctaatatctgaaatactgcagtgaacattcccttttagtgtcacgtcggcgctcaaaaagttttggattttagagcattttggattttggatttggggatttgggacactcaacctgtatgagctacctgggcatcccttaatccaattaagttacataaaataaaccatcacaaaaagaaaggtaatcaaaacaataagagaaaaataagatttcccaatcttctgaccagctgataaaagcttaaattcaagggaaaaatccacaaagtatgtaagtccacacaaatatagaaccatactatgaggattttcaaaagtatttgcaaaactagcaatggcattttacaaagtatagaagtatgcttctgcagtaattatgtgattacctatgtagtaaagtaatatgaattctaatctattttacattagttgattattttaaaatataccagtatgtcaaaatgattagatgaggctaatttggtgttaacagtaaagtttatatgtcagtgagtatggttttgagttttaaaaccaactctaacaattggatgacagaaatatatctgataggagtgacaataaacagactactaaatttgtagttgacaaaatctgaacttttttttactacaattaaacaaagatgataagttttgaatttttttttttttttttgaaacggagtctcgctcttgtcacccaggctggagtgcagtggtgcgatctcagctcactgcaacctctgcctcccgggttcaagtgattcttctgcctcagcctcctgagtagctgggactacaggcacccgccaccactcctggctaattttgtatttttagtagagatgggtggtttcaccatgttggccaggctggtctcgaaatcctgacttcaggtgatccgcccaccttggcctcccaaagttttgaattttttaaaaacttgacatttaaaatatctgaaatttcctaatatctatgtgcttaaataaatactactaaaaagttaattatgtctttcttttctaacaagactttcatggaactccatgagagacagaagactgtgtagtcaatttttaggctcatggaatattaaaaactgaagccacaaagacaagttaatgtacagtgagacttgcagtttcatgtctgccatataaagagaatgtgagttgtcactcttatccttacaacaagaagaaagctgaacaaaatgagaatcaatgaatcttcttagatccatcagagaattgaggtcacagtgtgaactacagcccctaaaactgcagacacagtgaaatacatagaatgagaacaaacagagaccagaagctgctggagccagtaattggtagaaacaattaaatagtaattgatgaaataaatactacaggctaggtggggattcacttgagagttaaaaactcttgggagtccagccttagagacgccccacattttttgtgagctttacttccaggaccctcatcaggtaatcacagtgaagaacagagaaatatcctcttgtgcttcagggaaaaggagaggcaaaataacccttttgaaataagcctgttcttcacagcaaaaacctgggcgtgcatgtgcacacacacacacgcacaacattaccagagggcttttctgacacctgggagaagggaagcacccaaataaaggccaatctagacttcttgtttgacgtaaaggcttggtggctggctgagaagcacttgtgagggtcacggacccatgaaaggctgagacctgataatgggattttagaacctccacccccaatacctttctggtatatcaataagggtcctatacaataatagtggtttacaactaaaagaactacaaagattagactttatttaagaatgaatttctagggaaactggaagacaactgaagagacaaatacaagaaaattaaaggaatggaaagccggtgacactagagctatagcaaatgttaatcacagcctaacagtcagaaaatagccaaaaatctaaccataccaaatgctggcaagaatgggaagcaacaggcactcttgttcgtagctggtaggaaaacaaaatggtgcagccactttggaagacattttggcatttttttaaacattgttttaccataccatctagcgatcacacacttagatatttactcaaatgaggtataaacttgtgtccacacaaaaacctgcacataattgtttttagccattttattcctaattgccaaaacttggagataaccaagatgtcctctaatagttgaatggataaacaaagtgtggtatatccacataatacggtattgctcagcagttcaaaaaaaagagttatttagtcaccaraaaagatggagaagtcttgaatacatatagttaggccaaagaagctaatctgaaaatgttgcatactgtttgactccacctacgtgacattgtggaaaaggcaaaactacagacaataaaaagatcagtcattgctaggatttcagagtagggaaggcaggatgaataggtttagaacgagggatttttagggcagtgaaactgttctgtatggtattgtattgacaaacttgtggcaatatgcatttatcaaaaactatagaattgtatacaacagagagtaaatcctaacgtaaaccatggactttagttaatgctgatgtatcaacactgttttttgtttgtttgtttgttttttgggttttttttgagaattagtctggctctgttgcccaggatggagggcagtggcaccatctcggctcactgcaacctctgcgtcctgggttcaagagattctcctgcctcagcttcccaagtaatggggattacaggttaactttgacaaaggctcagttaaacatgcaacttattttcacattattaatattaaaatcttgctatttataaaaaagactctataggacttttaatcttgatccagagaaagtgtgtgctacagaaaaagcccaatagtcacaaaaaagccacagtaattgttttgggaactctgtcacacagaagtgccagctttacacttgttttcagtgtttcagagtataacagcagtatgtctgtctgcatatctgcccacattctttttgtttgacattattataatacttaataaatgtacatattttcaagatatctgcccaaattctgagggtcaagataaacattaaaaaccggtccttatctgagatccatttttttttttgacattgactcaaacattttgtaactcagtctgtacccattactcatggagaagaatgaggtttcagggccatcttgcctgttgttttgtttttatcagtaagtgaattcttaacattagaaagattttctaagaataaatgtgtattgaacatctgtggttgccagaattacatgagttaggagcatttgtgacatccctgcaaccaattgtttacaagtgaaaaacagacagatgtattgaggttaaatctgtttatattagcttgtgctcattttctgatttttttggactaaaaaatgttttcgctaaacaataaaggaaacttcatagattcttgtcattaaaaaaataaagtgaagctatgctgcaaggttaaaaattatattctgtattaaatttgtatatatatacttaatttttaaaggtacatagtaggcatatgaatgagtaaatttgtacatttaatgattgtttttcaacacatattttatttaactcaaataatatgacagactgcataaaacaaagtaaaatgaaaatctaaatttgggtccctggttactccttttctaccttaattttctattatgaaaagccccatttttcagaaaccacttaacacctcttattttgcataaggctagatattgctttctataacaactatagcccccttaacttcttatatttcttgaataaatcagccacttttattcagtaaatacatattcaatgcctagcctactagatgccagaaaaaaatgctaattacagagtaagaccctgttttcaagctatttataatttaaaaagtactctggacaagcaaacattgatttacaacacagtaaaataaatactagttaggagaaagttcaaagtttaaaagtcactaagagaaacatagagtcttgtaagagtgagcctctcaaaggaaatgtaatctaacagtaattaatagagaaataagaaataacagggttggaggtgttgatggggtggagcaaaggataattttcttaagtgacagagtaggtgcagaaaaatgaaaagaaaggtaatgcatttgtggattccacaaacccttggccatttatttttctaattctcttgtgtaaattccaagtgttggtagctatcattacctgaaaaattcacagtatgctattttgtggttgggagcagagagaagtcaggtttctaaaataataatcgaaaggtgagtgatgtttacattctttctttagctgtcatctgctttttaaaattttcaggtctgcttaagagttaaaggcaaagagtttaaataggtgttttccaattgacatgttaagatacaacccaatgacttctttggcaggtcttaataaactgagctaggtctgattgagggtccttgctgtcttatttctttcctcattggcttctctttcttcactccaataagtttattcttttgaaagttaaccatagtcatgctattatttgtcaatgagtgaataagggattctcccttcccagtctctcttcccaggcctcttctttctcatcttttccttttctccctccttcttccccaacccctgacggcagacttgggaatttgaatatgagccaaataattaaaaaaataacagcaggatatttctacatctccatgaatgaacatgactctgtgtggttactgcagctgcaggtatgcatttacatctacattaactattgcatcatggacttcatgaagccaagcccccaaattaatctccacctccttctctggcattcaggatataaactcaccagaaacattccaaatgcagaagtggttctcatctttttttgcagcttaagatctgccttggtatttgaagagatataaactagatcaatttctttcacaggatcaactaaacaggttgtacttttttattattaatatcaatacttagattttagatatataaaatatagaatgaaaattatrtattacaaagctcttaaaaataaaatatacaaagaccaaagtcttgattgatactttagttaattaatgatgtgaagcatttaaaaccttttaaaataatttgttgttaaaaataatattttacatttatgtagtattttgttgcttattgctttaatgtaaaattacagtaccattgctatcttaaaagtgctgaatgctggacgtgttctccattttaccaatgagaaaataaagcaagsagggtagaaggaggtagaatagagattgacttttrgttttgtgttcctgtgataaggggtcttgcaaataggggcattactttcatgtaagaaacttcagataaatatgacagaaatccaaagtccttggtaaataattaatatgtaggtcattgacatatattgccttttaaatctgtgaatccttacttagtagaaactagagagcttcttgatctaataattgaacttaacaaatatttctgaacatctactttgtgtcatagtgctggagattgggatagaaacatgtacaaaagtcactttgccctcatacaggtaaatctaagaaagtagggactatragaaccctatgtatytatatccaccatagtattctagcactgactacagggcctaggaaaagggtaggcattcacatagggagtatttgctggataaaaggcaggttggaagatgmaggaggggagtatgcagaaagaaaggaagaaagagaggaaggagagcgggaaggaaaaacactttctgagtttaattgaatttataagtcacaattttaacaacttttttgatgtttatttctgaacaactgacctacatactcagaataaaaaattgacaatttctaactgaaatagatcttttgagaaaatggggatcacataggaagtaaatccatacattgtaatatgagacaatttaccaaaaggaatagaatgagaaaagatattttattacatgccacctactttgcctctcagaccaaaattgactatgaaggagtagctggaagtcagccaaccacttaatgataaatctaccactcccagctgactataagccaattcttataaacttggctgaacaccaagaaagtaattcacatgagtaagcaaaccaataggcaggacaaatcgtggtgcattttatacacatttcttctagtgaaagatctattttctgagactaaggagaaggcttggggaacaagtgatttattgataaggctaatatgcattttggaaatagaaatctcatatttttggtgacattacatctgatatgatgtagaggaaggttttttaaaagttgagattgtcctaagggctggggcaatttatgtgtgtagaagaacttatcaggcaggtttttgggcaaatgtgaacaggaggaagatctagaaagrctaatgtcaggaaagacaaaatgtgttgggaagctatgtcagaaacttgaaataagctaagtttggcagttgaaaaaacaagatactaaaggaatttgaaagctaatgaaagaaagtatgcctaattaaaaattctgttagtaaccttgaacatgaaatagattgtcatgggatcaggagatgaattaggaaatgataaccatcttgcttaaccttrtcatttttagccaagtcattcaatgggagtatccactaccttattgatcgaatggggaaaaaagtaattttaaaggtcacagaggaatcctttatactctcaagattccatttctttgatataaccattacagtgtaattaatttcatcttttcttttaaatacattcaccaagcatttggtttatttaaaaaaatgatacatattcaggaartcaaaaatctctgacttagatacccggcaataataatcaaatgtaatgatctttattgttatttgacatatacataattggataatttgctaaaataactgtaattctggacctctttgtctttttatatgccccagcaattttgaaagaaattgaagkttctgtggtttttatttatcacggaataaatataattgaatatatccacatttttatttagttttamgcattttacttcataatcacttgtgctttcctattcttttatgtgttagacatctttctaataaggttaaaaactctctatgtaccaaaactatttgatatgcaactttactatgtttttgccccatatgtgcaacaactaagaagtgctaggtatgtaggagggtcccsttatatacatagttgttaatggtgaaatattgttaagtacatacaaagtatawagcagaggttttttttcagtgtaccacaatgaattctgaacttgactattatgaaaagtttgaagaagtccatgggattctaatgtataaagattttgtcaaatattgggataatgtggaagcgttccaggcaagaccagatgatcttgtcattgccacctaccctaaatctggtaaatctctttgttgttcttytttcacctaaaaataacaaacacactgtaaatggtaaatattaaggtgttcatgtcgtacacactcattctctatattaagaacagatgcggtagttttgatatggacatagaaaaggtagctctattccatgaccacaattkttacctgtaacttgaatagtacattgagaaatggatgttgttgagcacagttagaaacttacataatatatactaatgaacctgtattcatcccataatgaaaatttaaaactaccaactgtttaccttatgtcattaatgttgtcgtatatacagcgtatgaccaccatttttacaggtactctaaaactctctttcagctcaccagccctttaagtctatctacaaaactccatttttaagcatagttctggagttttacaactgtagacttttagaaattagactagtccgaattcatatktcttcatctggttgttccatttaccacttaaaaataaagccaaacacactaagtatgcccttagttatcttttttttttttttttttttttttttgagacggagtctcgctctgtctcccaggctggagtgcagtggcgcgatctctgctcactgcaaactccgcctcctgggttcctgccattctccttcctcagcctcccgagtagctgggactrcaggcgcccgccactgcacctggctaatttttttgtattttttagtagagacgggttttcaccatgttagccaggatggtctcgatctcctgacctcgtgatccacccgcctcggcctcccaaagtgctgggattacaggcgtgagccaccgcgcccggccgcccttagttatcttgactctaaatctgcttctttattttcttccctattggaataaatggcagcacaataccwgtcatctgaagaggaaacccgtgagctattctagattcaatctctcttgcttattcatctggcatttgtaatcagtcaaaacgttttggtcatttagtctggtagataggtctcacagtcagcctcttaacaggtctcttgtctccctttctattgatccctcctccgctactgtgtttattctggcactagagaaattcttctaaaacacaatcctgataatcttgctcttctgcttaatataatatatgtcagtaccttttcatgatttttataaaaataacttggactctttagtgtgaactacaaggcttgttatctgcttgcctgagccccaactcctctcttcagatagaccctttgatttacgtcttatagtctatttccaattattttccgaaccactataccattcttaagtaccaactttagattaaaaagagagactgggcttctgcctggtagaactgtttcttacctcccacaagtggtgaatttatgccagtaattattaaggctaagctgaaggatcacatcctctcaaaggcatttcttgtcaaaatgtcatgtcagcagcaacaacagtagcagcagaacactgtgttatagatttcttctttgcagttatttaaatccctgtgccatattatacaatagtatcaataaaaacaaaatttattgtagctattgaacaatgtcactgacttcaaaaggcctttagctccctaaggacaggaaccagatttatcctttgctaagttttctgacctaggacccaacatgagacataatataccatcagtaaaatttttgattggaagcatgcttattcaagtcttcttactttttagatgtaaaaattaaagtccaaaactgttagcagcttgcacaatgtcacaattcatcatgaacaaatttggacacaggtctcaggtgtgctttactataatatttatctttatctcttgaggttatttttgtgttctaaacataaaatattatagaaaatatttcctgagtctgtggctattcagacaccctttaaatagtattgcattggtaccttccaactttttccatccataaatgyagcactaatgtcatcaactctacagggtcagcaggagactcaggtttatttaatttttacaggtacaacctgggttagtgaaattgtgtatatgatctataaagagggtgatgtggaaaagtgcaaagaagatgtaatttttaatcgaatacctttcctggaatgcagaaaagaaaacctcatgaatggtaacgttcaagttgattttaaaaactatttgcatatattctaaggtgtgtatgtacatggtacaagcaatgagattataagcaagaatggcaattagtatcaggtcttctacataagacagcatataaatttaaatttaaatttaaatcttgacaggctttgcagtatagtatgtgtacagcatatgtctggaatagagtgaataaggacaattcttrtatgccttcagcagagtttagtaatatgtaaacatttatttctctgtgggctaaatgtgatgatattttaaatatggagaaaaatacccataaatttttcaatgatatatgcaaaagtatatttaccacagattcttttaatattgtggaaaattggaaacaacctaaatgctaatcgacaaaagaatagttaaaggttgtgtaataacactataaaatcattaacatttttggatgtttcttgaaattgcagtttaaatataatattttgagagaaaaagatagttagaagctatcaaaacgttcatctgtgtgcatggtattgggatggctgtaaatttgagaatataagtagatttgtatagaaggttgcttgccaaaatatgaatgatatctctcaggtgatgaaattttatttcattttatatttttctatgtaattttctctatctatatttctttctttcatagtaagtattattatgaacacaatatagaatcttttaatttttaatttttgtgaatatatattagatgtaaatattaatggggcacatgagatgttttgatataggcatgcaatgcataataattacaccatggaaaatggggtgtccattccctcaagaatttatactttgtgttacacacaatctaattacaatatagaatcttagaattacttctattttacaaatatctatataaatccacataaatagttacaatttttgaagttgcttaacctttacttttttaaaaatcaggagtaaaacaattagatgagatgaattctcctagaattgtgaagactcatttgccacctgaacttcttcctgcctcattttgggaaaaggattgtaaggtaaccagagtcaagtgttctcaaaacttcatccaattccaagaaatgatagagtgatctcatcagttatacacacttgtttatttattctttcattgaatctatagacacttaacaaatgtggaataaatacagtcaatattgtcagagagtctatattttaattccaactctgtcttttgccagatgtggttctaaaaagtccagttagactccctaagcctaagtttttacatctgtagaagaaagataataataacatctttttcatggaattgttataaggattacatgataatgcttataaagtgcttcacctaattcctagcatattgtaaacaacaaatgttagctacttttgtatttgttgttattactaattgtattgaatatcctcccttygcaaaatactgtgcttggtgctgttaggcatgcaaatgaaccataaaaggataggtcagataactgtcatataataactatgtattgagtgcctattatgtgttagggacataasagtaagacacatgcaagccttgtcttcatggacacctagtccatttcagaaaaaggacaggttaacagacaagacaaaaagtatcataggtcaagtaagagagagaattcaaactcagacactgggggtagggaaggcatccaggagcaacatctcagctgatatttgaatgatgtatcrgtgtgatgacaattcagagatgatctgagggggcatctaaaatcagttcagcttggctggaagattaagtgtacatattggctaaataagtaaaggcagattagctaggaacggattataagaaatattgaaagtcaagttaagatgtttggactctgacattttaatggtaatgaggagtaatagacatattaagctgacggtttacactgtcagttttgctctttaaaaataatattatacatgacctcaaaatacagrgaaaacatgaagtctgagaccaccaattctgttcttcaagacctttctctcaccagtgctgttcttcaagatcttatagtattatttgcagtcatcactaacaaaaaggggatatatcccagtcattaaatatttccattttgtaatccgttacatggcatatttgacatttcctggagatctacagacaaaaatcaaagattgccaggttagtttgtttttatcattagcaatcctagatagacgatatacgtcctgctgaagtcattccatgcataagggctgtctcattagtaaagaccagttatgtactttccaggagatgtgtcattattattttttaagagatttgaccaagacacttttttcctttggaggatagtggtggacttgctgttaactccttacttctcaaatggaaacaggtaccagacatttataatagtccaagccttcacaaagctgcttatttttcagagtttatcaaagactaggagatagttggagggattcatgtttggagtatttccagggttatttacagagaaacaacaacaacaaaataaaacaaatagatacaggatatttgtaaatatcctttatgcaaatagatacaggatatttggaatgatggagcagaaactgtaagtgataaagagaagaaagtgacaaaaagtaacaggctagtagataayataaataactgaggccaacggatttgagccattggtttgattgtaggagaggtatgtggaataactgatggggaagaaggaagaagcgggattttttggaagaaaagattatggctcaggataattcttcaaaagtgaaacctttatggtgaaggcaagattcagtatttggttacaaaagtggttacaaaagtctgaagtaacatagaagtaatgatcaatgactacatgaacttagagaatcargtagatcacacacaccaacaataaaattacrcagaatgataaaagaatttgaatggagagtgaaaccatgaggcaggtgttcaaatcttcagttaaagcaagggaatggccacaagcttagaaatagcatcagataggagaggtatagattagttagttaagtatcataggaatagaataggggtctttttttaattatacttcaagttttagggtacatgtgcacaatgtgcaggtttgttacatatgtatacatgtgccatgttggtatcctgcacccattaacttgtcatttacattaggtatatcttctaatgctgtccctccccgctctccccaccccacaacaggccccagtgtgtgatgttccccttcttgtgtccaggtgttctcattgttcacttcccacctatgagtgagaacatgaggtgtttggttttttgttcttgagatagtttgctgagaatgatggtttccagtttcatccatgtccctacaaaggacatgaactcattcttttttatggctgcatagtattctatgctgtatatgtgccacattttcttaatccagtctatcattgttggatatttgggttggttccaagtctttgctattgtgaatagtgccacaataaacatacgtgttcatgtgtstttatagtagcatgatttataatcctttgggtatatacccagtaatgggatggctgggtcaaatggtatttctagttctagatccctgagggatcgccatactgacttccacaatggttgaactagtttacagtcccatcaacagtgtaaaagtgttcctatttctccacatcctctccagcacctgttgtttcctgactttttaatgatcaccattctaactggtgtgagacggtatctcattatggttttgatttgcatttctctgatggccagtgatgctgagcattttttcatgtgtctgttggctgcataaatgtcttctcttgagaagtgtctgttcatatccttcacccatttttgatggggttgtttgtttttttcttgtaaatttgtttgagttttttgtatattctggatattagacctttgtcagataagtagattgcaaaaattttctcccattctgtaggttgccttttcactctgatggtagtttcttttgctgtgcagaagctctttagtttaattagatcccatttgtcaattttggctttgcaaggacttcatgtctaaaacaccaaaagcaatggcaacaaaaagaataggggtctttaaagtgcaaaatttttaagacagattacaatcacaagtgaatcattgggaaactggtaactttgactcaagagagatgcagtgcaagtcatatcttcaggaaagagctagatttcccttgaggacaaaaaaatgagmatgtacagtaaaaagtttgggatattgaataagatctgccaaaataaagaatataaactaatagaagtttagggaaagagagatcactctttttttctatctgggaaaataaaaagcctcatggaggaccagaaggcaagctataaaatacagatagcattttgagaaacagaaaacattcaagaaagacagactagaacaaagaagacaaggggtgaaaattctgaagtaaattaatgcatacagtggcaaagggttccattcagctaatagatgaaaagaactaggaagggttataagtaagattggaaaagttcaatatggctaatgatggattttatatgaaaaatgttcacttttattctgcagtttttagaggcttttacaagagggctataaaacgagagctatacatctaagaataagctagatttctacaacattgttagaaaatgtcatcagtaagacaatttagtagctttagtttagtggtattccataaacagtggatactcaacagcatcctttcatgacattgcttaggtgcctgagggcctaagtagaagcccatgaggatactggactttactttcacagatcttttcgtgtaacattgagtatcagacctagagtaggccacagatgatctaacacaaatcatttgtttagtaaagaaaacatttaggtcaaaaattactgtactgttttttcttactgccaaaactagaaactaaaaccacagttttctgaaaactaattcattggtatttcttctgcatgtaaaatggaaactaacaaggtgttggcagaggttatattttcacctcataaaatgtttttttcctgtaatattgaaagtgaagagacctcagaactatttttttttaattatgtggagtgatggtgtagtataaagaccagagcactgtatagttgactgaatgatatgccaaatggtttactctcattgatttactctcaatgctatattatcactaaatttcagcttaatctcttcacttatacattgagaataataaataatgtaactgacttaatttatattgataaaatttacaacactcaaatgaggtattatgtgtgaaaatggcataataatgttgttctgtttgtagtgagaacaaagagaacaacactacaaaaaccactgtcacctcaggttattgaagatgtctttataaataattgtacatgtcttatgcattttgtaaaattaatrtgtattatgtttatatttgaaaatgtaaatcctttttaaaaaaatcttgatgagactgtttgaaaaaaatgttaagtggtttaatatacaatttcatcctcttagataatctatctttgccggaatgcaaaggatgtggctgtttccttttattatttctttctaatggtggctggtcatccaaatcctggatcytttccagagtttgtggagaaattcatgcaaggacagggtaggaacagcttctttacactgaattttttttcaaggttttataagacaaatgccatctccaagtaaaagtttttaactgttctggtacgttttcttccctgattcatagttaaaacacagaaatctaaaggcgcctggaggtttagagcaagcatactgtgtccagatgtagaaggcaaattgcagaatctgagcactctggtccaacacctaaaaataaatatatagaattatgtttgggagctgggggtagcaattttattctccaagattgagactcagtgtctgattttctgccttgtctctttttagtagaaacaaatgttttacaccgtattattacaactctattgaacaatgggttggggagagattagagaagagagaatgttcacttatttccaataaaattgccaggttctatatgaatatggaatttacaaagaagtttgactatctacaaaactcttcctcattctacccagagtgcaatctgaatattttaaccaggtttctcaaatttgttaagagttacttgagcagatattctggaaaatttttcgtttttattaaacacttttactaaagtgtttagatttgaggaagaaagggtgcaggatagtctagtattctaaagaaggccattctgatcatgtagtaacaaytataaagaaaaataataatgtgttttcatatccacagatgataatattgactcaagacaaataaggtatatgtgctttgtgtttgttgctacattttgggaaaatttttgctaaagcatamtgagtaatacatatgtcttaagaytgtcaagacctccactgcagggcagagaaatataattttgcatcactgcaaagggagaaataagatcactataaatttcactgtagaacattttctgtaaggaaaaattccctaatggagtcaaagaacagaggaggcatacaatgacttcaggcaaagcagaaccttttgmctcacacaacattatattattttgtcagctttatattttatgaaacatttttactatgagtgaggcaagagaaagaaaaaggaagagacagcatttggttatattacatcatttctaaaatctaatttcctggagtgagaatgacactaagggtacctacgagaacattccttcccatgtaaactaatagtgtaataaatactcatatagttactagttttagttgccaaacctagtttgtaaatggtaaatttgagaccagaactatattcttatgactatcagaccactgatagtttcactaagtcaactcccttcactaacaatttgattctacacacacacacacacacacacacacacaccagtttcaacaattttctcataagctttaaatcaaattgatgagagaactttccctgtttttctgtcataaactacattatctgataaagttcatactatttttacatacatagattatttaacatactttgcctctcttgctgcagagaactttgcttaagatatacagctgatctattctaatttcatgattatctatttatatttatttgttgttattgttgcttgaacactagttttcgagcagttttagagatgataccacttttacactgtttttctctstaattttagttccttatggttcctggtataaacatgtaaaatcttggtgggaaaagggaaagagtccacgtgtactatttcttttctacgaagacctgaaagaggtgaggaactgggaacacataagcaacttggtaatttctaagatgttagcatttgaaaatactctggatacaaaaatattcctttaaataaatgatgacagccatctcgtaaatttttaaaaggaaaggaccaaaataatacagatactttagcatagatttgaagctagcaaataaaaatattctgaaaataaatacattttaaaccacaagtctcaaaaatttcaaagaaaaaatttgaaagaacttgacttcatgaatcaataacacacacacataggcacacacacacacacattcacacacaaggaatcaacatgggcaagcaattaactggtctgcaaatgtaragatgttgcaattgttagataggtcctataaaataaccatgcttaatatgtttaaataaataaaagatgaaatttkaaaaattacaaagaaacaaaaactattaaaattgacagagcagatttgaaaaaaaatagccaaatacaatttctaaaaataactaaaaaaatatgaaaaattaagagatgggttcaataatagattagacatggctacatagtgaattattgaagtaaaagatggagctaaggaaattctatagaatgtagcacagtgagataaataggctatttgatgaaaagtaatggttcttactaagtattagcatttaaaaaataaaaatgtttttggtatataagatacagtgataatgtctcacatatatcaactcaaacttccagaagaagagtgtaaagagaatgctaaaatatcaatacacaaattttttatggccttaaaattttcttataatctaatttttcttcagctttattgttagtgtaattcaaaataaaaatcactatgagatacctgttttacacccactacactgataacaatttaaatatctgacaataacaaatattagaatgtgaatcagtgaaaagtaacacactgttgattgtagtgtagaaagatacaaacactggaaacaacttgtcattatctagcaaaggcaaacatgcacatagtttaagaccctgaaattctactcttagacatatactctagaaaaactctgacttgtgtacattaggttagatattcaataattttcatagtagcattcttaataactgcaaaaattgaaaacaacccagatatatataccaaagaatccatatataatgtattttattgtattacaattagatattatattataatgaaaggaagtacactaaawatacacatcagctaggtaaaatcaaactatatgttgtctagagattcatacctaagtttgaaacctataaagtagagaagataataatttgaaattagcagtttttttccttttcttttctttttttttttttttttgattgttttgtttatgtgggatgggagtagaggtgaagggaactcaaaagaaaaaaaaactaagaaaactgtgaatgttctatttcataagttaagtagtaggtaataggtgctgtatatagttttcctctttaaatgagatatatacatatatctcataatttttaaaacatagaaaacataatgagtttctttattaagaggtgagaaattttctctattttcttatcctttactatcaccaaaaaagcaattgatatccatgtcttattcatatatttgaataacctttaaaatcctttatggtatttcagtaattttagagtgtttttggtgagcatttatttaaaataaaatcataaataatattttataaattaaattatgtatttatagaatttaacactagatcaaatttgaataagaaaagcagtcatgatctacagtttattatattatccaatactgtgttctgtaattagactattaatgacaktgaatttgaaatacacacaaacaaaattaaatagttactccaactctcttcctccatttcaaattgtccatgtctacttactcccgattttggtcaataatagccatgtttaggtttcctctatatttgaattaataaggctaagaatgtacaaattaatttttatttgtttctacaatrtatccagtagaaagaaatcaagacattatcactatatatatacacatatgtctgtatatataaaataagattttgtgtatatattatatatatatacacatacatgtgagatgcctattttgcacccatatatacatataatcttttttcttgtgtcttgaagcatcatctttttttaatttcaatttttaatttttatgggtacatagtaggtgtatatatttatggggtacatgacatatttttatataggccaccatgcgtaataatcacatcaaggtaaatgaggtattcatcacctaaagcatttatcatttcttcatgttacaaacattccaatgatagtttttaattattttaaaatgtacaataaattattgtctactgtagtcaccatgatatactatcaaatactaaatcattctatctagctctatttttgtacttattaactatccccacttctcttttgagtaagatagacaagtaaataaaacattacaaaaatacacatgtggtaaattagatttatttaaacaattatgggagcaaaacagggtcatctacccaaaattagaatagccaaggatattatcctaaataagttgataaataagctgaaatcgaaaaggcaaactacaatttattgagcagagaatttagaaacagcatttgattggcatagagagaaatgtgcacttgaatacacattgcggttagtattgcaaatagttgcactgagagatatagctgaataatggtgtatattataggagtggcacagatatggggatgtttgtagctatggtgtacagacaactgatgttgcattgtgagtatttgactttttacaccttttcttaatctttcttgtttctttgtttctcactaattacaccaataaattaggagaaaaatgaaaattgcctgtatatctttatcccccaaacttgatttttcacaggggactttaggttttgagtatgatgtttgttttcatagacaacatctattaagtgtgattatgcatcaaggactacaataagcattcacaaacatctcatttagttttttgaataatcttaaagtatcttttataagcattttatggatgaggaaaattatacttaaaacagcttttataaaattcccccaattagatttctcattagaaatctaattctaatatcagtaggagaaaagagaaaggtttattttttctctttcatttagatagtgatttattcagttttagcaatttagttctcaaaacattttctctccctaggatatcagaaaagaggtgataaaattgatacatttcctggaaaggaagccatcagaggagcttgtggacaggattatacatcatacttcgttccaagagatgaagaacaatccatccacaaattacacaacactgccagacgaaattatgaaccagaaattgtcgcccttcatgagaaagggtgagaaaaatgtggtttgcctcgatactagaggaagtcacaaggtgacatggttataggcaaaaatctagtgaggtattttaatgcctatgaacccagcttaagttttcttcagcagtctttcatatttgaatacactctttaagttacacttctattacattgcaattacctgttgattatttattatatgcatcatattatgttaaaataactagcagactcctcaatctcagcattggaaatagtatcacactctactagctgtaatttaccaagcctatgtgcctcagtgttacaacatgtatcatatagttcctttaagttctaaccagaaattccgcagaaagattttattcctctctcttyttgagttgaagaaataagtttagaatagtttgtcaacattttttaacaagtggcaaacacctttcaagggtaagtggmaaaaaatagaaattcaaatatagctctgtttagcaaaaaatatcaacatataaggagaaaaaaattctatttgrggggaracatagcctgatgagatatagccagttaacaaatttaaaggcatgtaagatattcagatattcagagcactgggacaccagtctatttatatatgaggaagcagaaacaaacagaatagaatcaaatcttgctctttgaaccatwctgtcagtgagagtcagggaatttgtaaaataacaaacctgccactggggaaaaaaacaaaacagaacagggatccactgaaaagagattcagttctcaaactatattttaattatgtactcttttgattatatgtttcctttttcaaaattctacatataaatgttacagaggacttaaaacrgttgtcttgcttgcaaacggtgacttgctgctgtaccctcagaacctatctgatttttttaggatacacatgttctgtcttctggtttttgggttatttcagtgggaaagtttagagctccttgagcaagagggcaagtgaactcttgaatagtttaaaaaagaaggtgggctgggcgcggtggctcacacctgtaatcccagcactttgggaggccgagacgggcrgatcatgaggtcaggagatcgagaccatcctggctaacacagtgaaaccctgtctctactgaaaatacaaaaaattagccaggcatggtggcgggcgcctgtagtcccagctactcgggaggctgaggcaggagaatggtgtgaacctgggaggtggagcttgcagtgagcagagatagctgcactgcattccagcctgggtgacagagcgagactctgtctccaaaaaaaaaagaaaaaaaaaaaagatgaattccttctgcaaggtgagtgttggaagtatgttaaaaagcaaaacaggaaaagcctgctggactattataattacccagatragaaacactctctggctggcagtagcagaagtgtttaagaggcagtagatataaagaaagcctgaatataatgaattagatgttgtggttaagagaataacgtccaagcttatgtgtagatacctggtgttgactctacacaggtcattaaaatgtaaatggagaaaacacaatatgctaaggaataaaatgaatttatttttgaactaattgtatttggaaaatttggacatttttcaggtggcaaaatcatgtaggcagttgtatataaagcataagtctggattttagtgctatcagcattaagatgatatttaacaccttgagagtgggtaaaacatggatcttatcctgggagccccaacagctgagatgaaacttcagaagaaaaataaagtaaatggcataagaagaaagaatcagagaattaaatttgttgtttttttaaaccaattaggacaaatccatctttgtaagcccaaaaaagtatatcattaaaggtatacatttgattcytaaaattgagaattacaagtataatatttgattaggtgttaatgaaagtgatgaaattagcaaacctaatgattctttttggaagacttaatatttattgagctttcttttttgttacaggaattacaggagactggaaaaatcactttacagtagccctgaatgaaaaatttgataaacattatgagcagcaaatgaaggaatctacactgaagtttcgaactgagatctaagaaggtctttctttacttaacatatctgatattaaagatttcttttcattattctccactttttcttattttagattgctagaaaagacataatcatggattatgttgacattttctttttaaatttttgtttaactttttttttttttttttgagacagagtctcactctgttgcctaggctggaggacagtggcacaatcatggctgattgcagccttgacctccttgactcaattgatcctcccatctcagcctcccaagtagctaggrctacagacatgtgcaaccatgtttggctaatttttttaatgtttttttgtagagatgaggtcttattatattgtccaggctggtcttgaattcctgggctcaagcttcccaagtagctgcaacaacaggcacacaccaccatgctcaactaattttatttctattttttgtatagacaggggcttgctatagtgtccaggctggtctgaaacccttgagctcaagtgatcttcccacaccagcctcccaaaatactgggattacaggcttgagcctccatgcctggcccaggtaacatgtttattgagctgtacatgcatatgagaaataagaaacttttttttcctactatcatctcttaaattttgttttctttttcttttgcttcytcttcttcttttctattttttataaatatcatgcacaactataacctatgggaatgatgtagtaacacagattattcatcttgttagagttgtattaaaaataaacaagcatttcaaattatttttgtgattgattttccatttagtaggacattagtatataataaaaatggtgcatgaactttgaagactctggaagaaagaatgaaataatatataaatagggggcataactatagctatgatttccctccttattttcttttattttctttttttttgagacggagtctcactctgtctcccaggctgcagtgcagtggcgtgatctctgctcatgctcactgcaagctccacctcctgggttcccgccattctcctgcctcagccttccaagtagctgggactacaggcggccgccaccacgcccggctaattttttgtatttttagtagagacggggtttcacagtgttagccaggatggtctcgatctcctgacctcgtgatccacccgcctcagcctcccaaagtgctgggattacaggcgtgagccaccgcgcctggcccattttcttttactttcaacaaaatgagttaattttaaatttaccttagtctaactccaatttttcaacataacacaacagatttccaaacatccaaaaataattccaatgagtgttatttatcttcagctagtttgaaatatttatgctttagggttccttctgtcctatatgcaatccaacaaatgtaaatattgtaaaataagttttaaagaataagatatttggcagtaaaatataacaaaaacagaagaaaaaagaattaaaattttttattgttttttatttaaaacatcttctatttttaaaattgtattctttttctgtactatgtttagtcaatgcttcctttcactaacacagaggagacacaagatcattacatatttacttagggtcttcagtagaatgcttatctagactacaatagactaaaaggccaaatctggggagaaatccagatgatttattttcttactttttggagaaaagtccatggatttctgagcaccctattcaatagttatagtttttaagaatcaaagcttttttttaatgtttaatatagttattaattatacaaaaattggagagtcttggaaaatattaagatattgttgaggacagtgtttaccgggggaatcagaatcaatccctgaaaacaattgttttacattttttatgtgcccatttagtcataatttttaaaatttcacattataatgtccaataacttttttagaatgcattttgtaagattcatagtgatgttgcccacattataattgacgtaagtaagcaataataaacctacgtatatttctgacatcagtccttggtggaacaacacattccagtttagcctgaataaaatttggaccaactatatctttccaaagcttgccaagaaacttctgtatcttctttggagaagtaatacggctgggatctagcttcaatttcacgtagaaacttcaacacctttagattattggcatcttcctggagctgggcttacagtccatatggactggagacaatgaaaaccttggacggcatcatgtggtaaaatacataggggtggccaatgtagctttggttctgtgcttccaagaaagctacagaatttttttacctcattgcttaatatttcctaataattatatctctagaacaatgccttcaggcccagataaattcacagaaatactttttaaaggtttatggactgactgattaataccatgtgttatcatttgaatgtgttccccaaaagtttatgtattgaaaactcaattaatctgccctcataaatggattaattgattaatgagagctctgcactcatgaatggattggtgtcactatcccaggagtgggttcattattgccagagagactttattacaaaagtgagtcctctctggctcttactgtctcacatatgatgccttttatgttatgttgcagcaaaaaggccctcaccagatgccaatggcatgctcttggacttttcagtttcccaaactaagccaaacaaacttctggattttgtaaatcccagtttatgttgttctgttatagtgacagaaaatagacattctgtcaacactaggaagtactcagttagcacttatgggtgtggtaattgctcataattggagccatcccataaagttcatccatatggttaaaatacctaagaattcaacttgagcaacgaataaatgaagtagtatgagactatgcctgacagcataaaataaacaagcatccgtgttgatataaataaatgattaaataattaaatgtggtaaataaatataccatacagaagaatttcacctacttatgtatagttccccgtgccattccttaagtgtgagatccatattgggactttcttataaagggcaagtgcagtatgaggggaagagtaactttggagtggagaaaccctacctcagccaggtaattccccttttgtatataactaattacctgatcaggcagatcaccttctatgtcctgctctctatcagacctctgatctcactgccactttccattccccaggcatgctacttgtctgctaggcctctgaaactccttagccccttgtatgctaccattttcaagggaacaaagggaaagaaaaagaaaagagaaaataaattttcacttatttttaggtctaatgtcttcagggtccagtaaaagtacagcgtcataaaagacctccttctgctccctttgctgacacctaccttagcctcgtaagccagaagacttgaaaaggttctggtccacatctcaggtaacttctgagaaatcaagaaattcttcattgtaacagcaaggtttaactctcttgaattctgttctttctggattttggcccaatatttaaaaattttcttctcagttcagcaaaatgaaagaagcttaaagtaaacagaataaagtaaaaaaaaaataaaaacaattaaattaaactggatacaggaaaacaatggagaaaattaatgaaagcaaaagctagttctcaaaaaaagattaataacattaataaacctctacaaagactgacaaagatgggaaaacagaggacctacattgctaaaatcagcaataaaataagaaatataaccacagattctacaaccagtgaaagcataagaagaaaagtctgtaaactttatgctagtaaatttgacaatttagaaggaatggccatttcctcaaaaaccacatactaccaaactcatacaaaatgaaataaaatacctgaatagtcctataaccattacacatataataaaatactcttgaaagagaattcacaaagcctagatgacttcagtgaattttatgaaacatttaaaaaagacacctagtaatggtaatgatacctgtcttaaaatattaaaaactggccaggagcagtggctttcacctgtaatcccagcactttgggaggtcaaggtgggaggtctgcttgaacctaggagtttataactagcttgggcaacatagtgagaccccatctctactatttacgtataactggtttgagattcttgtaatttttcatataaccaaaatattttctattatgtggttcttttttgtctttagggtttgaatcataatgctgagaagtggcaaagtttttaaattttcaagtttatcaatctgtacaataatggaatttaaagttgaagttttaacctctcatttaacaaaatatgaagatagagttatatcttcatcctttctgaacatcccaaacaaacactttctttgactccataaaaagatcttgattgattaatatgtttttcttatctttcagggaaaaagccaaataaaccttaataagaataataattattattattgttaatattttattgatcattgctatgtgtcagggattgctccaaatgttttactcatttcattgtcacaactcttcaataaaatggaacataaaattattcccattttaatgataatgacattatggcaaagaaaatctatacaatgtacacaaattatccaaaaatcacacatggaaagtccttgtgaaaacctgctcccagatccatagtagatgctcaataaatggtaatttctgcatctatctaacccctacctacattttttttttttttgagacagggagggtctcgctctgtcatgcaggctacagtgcagtggcacaatcatagctcactgcagcctcaaactcctgggcttatttcatctttccacctcagcttcccaagtagctgagactataggcacatgctaccatgcttggttcaaccctgacctacttgttattttacaaaatagaaaactttttgctaattgttttataacagttagatattgtcgatatttcaatctccaatttacaatttcagataaaaccatatcatcatgataaaagcatgatgacaggaacacagtattattacagaaacaaagacaaaataaattaatacagatacacaaacacatgtatgcaaaattatacttttaacaaagatatatgttttacttttgaaatatgtttcatttagactgcaaaacaagcaagaagatttattatgaatcagagttgtttgtgctctcaggaaggaagataatgatctaaccaatctctttcactgggaactgttttctgaatattataaggccccagggattccagatggaatacagtataattaactcttcaccaccaaatacctatgttagaagaccttgagaataaatgattgcctaatagcaaatggcatcctacttcttgactacacttgcacctgaggatacaaaaggacaaggtgtatttaaccttagaatgtctctataagatgaaaacaagtaagtgcaattatctccacttaaagtctaaagttggcaaacacttataagataaatgacttgctcaagactgactaggaggaagagttttagtataaaaacttaaactcattatctcttttttacatgggactgaatggaggattgagaatggctctttatgtggaagataacatatttaatatattttctttcgttttaaggcagtattgaaatgaaaaaagaataaacttctagattctgatagtatacatggtaataatgtaatcattttagtaataattaagctatattgggtaatttttgcatgccaaacagcatactgcatatttacatgttaaatcattccttttatgaaattttaacaatgacaatgatgtaatagcaatgattctatgaagaatctgctaagataaagaagcctaggccaggaactgtggctcatgtctgtaacctcagcacactgggacgccaaggagggagaatagcttgaggccaggagtttgagaccagcctgggcaaaacagcctagtttctacaaaacaacccagtctctacaaaaataaaaataacataaataaataaataatcctctactcaataacaaagttcatttgcccaaggatacgtatttggtaactgaacatttctaatgataatatgaatttcaaaactattattattagtttgaaatgttagtgtatgatatagaaatcatacctatcaatcagtattcagtaaatatttatcttctacatttattttctttaataatataccttggtcactattcctgtttattattacacctttatcttccttacattcccagtcatagcctttctatctccacttatcataaattcagtttgaatcttccagttctccaaatagacataatggttatctttctctgtttctaacacttttgtaacagttcaagttattctctctatttaagatccagtggtgacaaagtgttaagtgctgagcatgcaaagacagtaagacacgcacagttccacttttatggaatttataatgtaatgccacataaattaaacaatcaactctaatattagtcatatgcatttagcatgacaacaggatgctttggaaacacataaaggatacgtacccaaataatggaaagtttc

SEQ ID NO: 95760 - DNA, 25945 bp, Homo sapiens
  misc_feature (1)...(25945): n = A,T,C or G
aggaacgaaggctctttggagaaatggctgactccaggtctggagcaaaatatttacaagattagcctaaaacattttgtcataccaaaaaggaagtaagctatcaaacactgcaggggtctggtccaaaaaactcagaagcccacttgaggtggttcccactggtcaagtaagaaacaatttgaggatcaaagtaataaatattataaaaatattttaaaataatgtcaatgacctgaaatacattaaaaatgttagcatcaatgtgttcataaatacaggcatctctctttttttcccccgagatggagtctggctctgttgccaggctggaatgtagtggtgtgatctcggctcactgcaacctccacctcttgagttcaagcgattctcctgccccagcctccagctaatgtttgtatttttagtagagacagggtttcaccatgttggccaggatggtctcgatctcttgatctcgtgatccacctgcctctgcctcccaaagtgctgggtttacaggcgtaagccaccacacccagcctggcatatcttagagatagtgcaggttttgttccagatcaccacgataaagcaaatatcacagtcaagtgatgcccatacgtttttttggtttcccagtgcatataaaagttatgttgatactattctatagtctattgtgtggaatagcattatgtgtaaataaaatgtacataacaattaaaaatactttagtgctaaaaaaatacgaatgatcatcagagccttcagcaggtcatgatctttttgctggtagagggtctggcctcaatgttggtggctgctgactgatctgctgaacgctggggtggctgtggcaatttcttaaaataagacgcaataaagtttgccacatcactgactcttctttttacaaaaaatttctctatagtacgtgatgctgcttgatagtattttacccatagtagaatgtctttcaaaattgcagtccattttctcaaacctgccactactttatcaactgaattgttataatattccaaatcctttgttgtcatttccataatgttcacagcatcttcaccaggagtagattctatctcaagaaaccactttatttgctcacccataagaagcaactccttattcattcaaattttatcatgagattgcagcaattcagacacatctttaggctccacttctaatctggattaccttgctactaccaccacatctgcagttacttcctccactgaagtcttgaaccactcaaagtcatccattagggttggaatcaatgtcttccaaactcctgttcatgttgatagcttgatctcctccacaaatcacaaatgttctttttttttttttgagatggagttttgttcttgttgcccaggctggagtgtaatggcgtgctctcagctcactgcaacctccgcctcctgggttcaagcaattctcctgcgttcaagcgattctcctgcctcagccaccctagtagctgggattacaggcacccgccatcaagcctggctaatttttgtaattttagtagaggtggggtttcaccatattggccaggctggtcttgaactcctgaccttaggtgatctgcccatctcggcctcccaaagtgctgggattacaggtgtgagccaccacacatggcccgaatcacaaatgttcttaatgacatctggaatggtgaatcatttccacaagcttttcaatttgctttgcccagatccaccagaggaatccctatatatgacagccatagtcttacaaaatgtatttctttaataataagtcttgaaagtcaaaattactccttgatttgtgggctgcagaatgttgtgccagcaagtatgaaaacaacattaatttccctgtaaatctccatcagagcccttcagtgaccagatacattatcaattaacagtaatattttgaaaggaatctttttttttttttttttttttttttttctgagacagagtctcgctctgtcacccaggctggagtgcagtggtgcgatctcttggctcactgcaacttctgcctcctgggtttgcgccattctcctgcctcagcctcattctcctgcctcagcctcctgagtagctgcaacttcaggtgcccgctaccatgcccggctactttttttattttttttttagtagcgacagggtttcactgtgttagccaagatggtcttcatctcttgacctcatgatccgtccgcctcgggctcccaaagtgctgggattacaggtgtgagccaccgcgcctggccctgaaaggaaacttttcttctgagcagtaggtggccacggtaggcttattcagtaaaccactctctaaacagatgtgctgtcattcaggctttgttgctccatttagagagcacaggcagggtagacttaccataattcttaagggccctaggattttcaaaattgtgagtattggcttcaacttcaagtcaccagttgcattagtccctaataagtgagtctgcctgtcttttgaggttttgaagccaggcattgatttgtcacctcttgatatggatgtcatgggcggcatcttcttccaataggtggctgtttttttctacattcaaagtctgctgtttagtttagctgccttcatcaattctcttagcaagatcttctgggtaacttgctgcagcgtctccatcgccacttgctccttcaacttgcacttttatgtcatgaaggaggcttttttccttaaacctcatgaaccaacctctgctagatgccgacttttcttctgcagtttcctcacttctctcggtcttcatacaactgaagagagttaggactttgctctggataaagctttggcttaaggaaatattatgcctggtttaatcttccacccagaccactaaaaccttctccatatcagcaataaagctgtttcactttcttaccattcatgtgttcactggagtagtacttttaatttccttcaagaacttttcctttgcctttataacttggctaactctttggtgcaaggggctttgcttttggcctgtcttgtcttttgacatgcctttcttactaagcttaataatttccagcttctgatttaaaatgtgtgagagatgtgtgcgtcttcctttcacttgaacacttaggggccactgtagggttattaattggcctaatttcaatattgctgtatctcagggaatagggaggcctgaggagagggagagagataagaatagccagtggatggagcagtgagaacacacacaacgtgtattgattatgtttgccaacttatatgggtgcagtttgtggcaatccaaaacaattacaatagtaacatcaaagattactgatcacagatcaccataacagatataataatgaaaaagtgtgaaatattgcaagaattacaaaatgtgatagacatacaaagtgaacacgttgttggaaaagtggcacctatatacttgcttgccacaaggttgtcataaaccttcaatttgtaaaaaatgtactatctgtgaagtacagtaaagcaaagtgcaataaaacaaggcacgtttgtatacttacctgaaggatattagggaactaactaattattctgaagattaggaaataatggtgaaaatcgcacatttatcctatctttccatataagctgtatagatatttaattagatgaagttctttattataaaataatttgttagtaaatgtagagtgaatatcaaattagaatatcactatttgcaactcataacaaaatgatggatgcaggcaataatcatgaatggctgctaaaactattagctgaaaagttgatggaaaaatttataatatatttatcataaatttaatatttaaataatataattatatttatcataattatatatcaatgtcatatatttatcataaacatttaccatatttttataatatttatattattatttatcatacatgttatcaggttgacaacatctgaacccaatgatcaagtataacattaaaaaaagagagacaaccagaagttgtaagcctcttgaagtaattcaatacaaagtaaactgtaacacctataaagtcttttgtgaaaaaaaatcaaactttaatctgagtaattctataaagttaactaccagtttgcaagaaatacagggggaaaggacagcacaggaataaaatctgcaaaattcagaatgtggaaaattctacagaacaaatgatcattactctttagtaaataaactgccagaaaaaaaggggaagaggaaggaatccatagatttttaaaaatcaaatgtgatgtggagactttgttcagatgaatcaactgaaaaacatataaaacttctgaggcaagtgagtaaatttgatattgaatgtttcttttatgttattacagaattattgttaaatttgtaatactagggatattgaagttgtgttgtttttcaaagcccttatattttagatataatacatatttccaaaaagtttactcttaaatatttgtcatcaaaacaatatggggtctggaatttacttcaaaacaatcctaacaactgggagaactatatattaatagttgttgactctggatcattaatacacgagggttcactatactaatctaacatatgtttgaatgcaaagattgggtactccaagtgaagtaactaatcctttctgaccacctgtctggtcactgaaatcattaaaggctgaaaacaactagtcacataaagaagcatagggcggccgggtgcagtggctcgcgcctgtaatcccagcactttgggaggccaaggcggatggatcacctgaggtcaggagttccagaccagcctggccaacatggcaaaaacctgtctctactaaaaatacaaaaattagctgggcctggtggcgcacacctgtaatcccagctactcgggagactgaggcaggagaatcacttgaaaccccgggaggcggaggttgcagtgagccaagatcgcactactgcactccagcctgggtgacagagtgagaacccatctaaaaaaaagaaaaaaaaaaaaaaaacagcagcacagggcgttagaagccctcatgatcaatgtcaactggtgcatacagcttcacagtgagaaggagcttccaagggtaaaatctgggtgggaaacagtgatcaattgtaagagacccctgtagctgttgctgattaccaaggagagagtttagtaaaggaaaaagccctggtctggaagttagaagaccgccaacacctagttttgtaatctcggactcataacttctgtaggttttggagcataaaagcacaggaactgaaataaaaaataacgacaataattttgttgtgggtgcccactctgcacttcacaacatcctaagagctttggatacattatcctatttacacctcacaacccaaggaggtgttttgcgcgcttgatacatactttttaaaggactactgaataagttaggcgtcagtatatgataccagttttcccatggggtgaatgattaaggtgttacagaggccgaatatctcgtttaagagtgacttggtctagtcaatagtccaggattatttaacaggaaagaatgctttgagcactcaattgcattggactgtattggagagagggctaggagttgggtgggagacgctggaaaatttaaaatcgtttccttaggcctacagttttccgatcgcctgcaccacgttctatctacacatcacagtctcaggagaaggattttcagcccttcattcagctccaatcctttagaccgcgatctctcccgcgccggctcccaaacacttccacccccaatctccaccccttctcccttgcgcacaacctgtgggcttcaaactacatctcccataaaaccgcgggggccccccycccgccccccccccacccccggatctccaccggaagtcgggaagactgcatccggctccaggaaaagcgagtgggatatcccaatctttggactgcatcctggttgcctctactgtggtcacctttgggttagtagaagcagtggggagttagtcgtctcattgcctcctctgggggcggtgaccacttccctgggctctttggttcccgcgctgccctgcgtggccctgctgagttgtgtggcggagcctcgtagtggtttggtgggcgcaggcgcgggagccacggacgcatttgcaggggctcccgcgacagggcggaggtgcggyggtactgaggtcgtagagtttcctgcccaagctgagatggggaaaaggaagcgctacttagggtgtgatttcacctcgaaagaaggaatctcacagtagtggcaagaaagtaaaatatcttaaggcattttaccattttcagagaccgtgcacgggtggcacttaatkggtcttgagtgcccagggagtggatgaaattcgttaattgatggtcagtgatttcagtgacagagcgatatttaaggtcctgtcctgtcccattcggtctgtgtgagcatgcggaagtcatgggccccgggttacatgtcagtaaaagtggatgttggtttgttaaaaatttatgtccctttacatctaatattcttttaaatgatttctcggaatagtccttgagcttcttggaaaacaagggcagcactttattctgccttcaaatctttaccttctataacctgtcaatgagaattgaaaaagtaaatcaaacagtagaattgggtgttagactttatgtgcttctctggaatgaataatggtactatttctagatggcttttctgctgagaaagctagagggaaaagtgtacactttccacttcccatctccacagaatagcatatgcataagcattgccctggaggtagtgaatgacgctgtatttttgaaggacaattttgcagttacctggcgcggcctgtgagaatgtgagggagtgacggtgaccccagaacatgagacagtgaaatattattcaaactaaacctagctgaaaaaactataatatgggtttttggaaaataaacttaagagaaagacaatttggaagggagatcagtacaggagctgtacagcagtgcttcaaaataaagtcctgaaaatttgtagcttttgttatgcatagtatttttaacgtatgtagaaatttcaatatgaaaggaacagcgaagtaaattctagaataaatcaaaaattattctgtcatgtagatattacttctggtaatttaatttctaaacagatttccactgttaggtttcatccaagtgtttccatgactgtgagcagttttaacctatttataagtagcagaaagacacaaataggaaaggtgaacagctccaaaatgagacaattaatctttactccttgttttccctaaattttgttcatactattcctgctatgcaattcatcagccagatcgccctttcagaacccaggagacagcagctatcaaaaactatgggctataacctttctgtctttttagcttaaaaatcttattgcttagaatgatagaaatgttgttagaatcccaaatyttttcttaatagcatttcatagaaagaagaattataccttaaaaaaaaatactttgagaagttcacagacagttgaatcatgaaccattttcaccatcccccgccgccaaaaaaaaaaaaagacaaaaaaagctcagtgtgtgctctatcatctgcagtccatgattaggcaatatttaagaggtatggaacaattatttcagggtttaccccaccgaaacaaaaaggtgacaaagcagataaagttaatgagttttaaaagctgctctgattcaaggacaacaaagtgaccaacagaactgtccaataatagaaccaaaaatatatgatcatctgatttgtgacaatatttgtctcagtgtagtaggacaaagatggtaatttcaagaataatacggagtaatatggattatgcattgggtaaaaaagtatcttgacccctacctcatgccatgaacaaaaatagatcctagatggattacrgaattaattgtgcaaggtcaaacaataaactgttttcctgtgaaacttataaagtctctgcctttacttccatctgttttaatgctctccccctcatgtccccaccccatcgtgaagtcccctctggtctaccctaaatacctcctccttatgtaatatgttacctggttccccctcccaaggatatggccccctcgtctgwactgtcagagctctttattcattattttgtgtaactcccatgggcatataaattgcrttgcattttataattctaaamtgataacattttgaaattgaaatgtatgctgtttaaggattgcctgttgaatagtatgttgccttggaaaccattgctattattctattgctatttatcaatattgttcattgataaaaaagcagttgcaaataagctttttcccctgattttccttcttttaaggaagaaatgtcttctgtaaaaagaagtctgaagcaagaaatagttactcagtttcactgttcagctgctgaaggagatattgccaagttaacaggaatactcagtcattctccatctcttctcaatgaaacttctgaaaatggctggactgctttaatgtatgcggcaaggaatgggcacccagagatagtccaatttctgcttgagaaagggtaaacattttaggctgtaccacctgaaagggtttgtggtttaatttctttgttacatatttactttaaaattttgcttgtttccatatttatattgttgaactactaaataactcattggctaatttatgtaaaaatgtagcacaatttttctaacttaaaactttgtaacctttttcattgagaaattatttctttatagcaaagcaaatttatgaggagtctaattataaattttcctcccaaatagaaaatgcagatctcactatgactaccaaggacttcttgtagaattttggtatctctttatagtgcataaagcttaatactgttttattttgtgagtaattatccagaaagtgtaagtatccactgtctcttaactttttgtcatttatgattgttcttttaaccttcccaatagtaaactatgtaacaaaagaaaaaaaatctatgtaatcattaaaaagaaggactttaatatgtatctggaaatattttagtgaaataaatacggagaaagtgtttacttcctattttactttttctccccaattttttcttccatctataggtgtgacagatcaattgtcaataaatcaaggcagactgcactrgayattgctgtattttggggttataagcatatagctaatttactagctactgctraaggtgggaagaagccttggttcctaacgaatgaagtggaagaatgtgaaaattattttagcaaaacactactggaccggraaagtgaaaagagraataattctgactggctgctagctaaagaaagccatccagccacagtttttattcttttctcagatttaaatcccttggttactctaggtggcaataaagaaagtttccaacagccagaagttaggctttgtcagctgaactacacagatataaaggattatttggcccagcctgagaagatcaccttgatttttcttggagtagaacttgaaataaaagacaaactacttaattatgctggtgaartcccgagagaggaggaagatggattggttgcctggtttgctctaggtatagatcctrttgctgctgaagaattcaagcaaagacatgaaaattgttactttcttcatcctcctatgccagcccttctgcaattgaaagaaaaagaagctggtaagaaatgaatgctgcttttcattggtaaaatctggtttttagacttgagttggagttgtatgtatttgcactttccaggggcactctttttccagtaagcagtgaaattagactgtcttcatcagaaacytcttaaagttctcaccctaggggactactctcctgggcagttagtagttctaatcagcccagactgatttcctgagaattaaccctggtgcatgatgatctcatttgattcttcattgaataattcttagttcctgctacacgtagaacatgatggcaaagactttgactgttttgttttgtattctgttgatggggctttttatggcatggtaagaaattggggtttgattctaaagccatttaaatgtaacctaacctgtgtttaaaatatttttttaaaaaagacactgcacactggctgcatcatagagcataaattgtacacatgtaagtaagtaagtgtgaaagttgggagtcttgttaagagggaattgagtattacaggtgcccaagtaagagattgcaatggcttgagttagaatggaggcagtggagatggagacaaagggagaatctgaggtattctcgaggtagaagggatagggyttgatctgtaggttgagacccttataagtgagagatggtggtaatatrgcatgaattaaggtactgatagtagaaatggaggaaagagggtatatgcaagataaagtttggagagaaaatcactggtctttgctattgaattggatatgggatatataataatgaaggaaaagattaagaatgactgctaggctagagactttaataatttggtatatagtgataccatttctcaataatataggatgatggktagagcaaggaaagcaggacagacttggattaaaaaaatcaagagtttacttttgggcatactaagttttagaaatggacattacaatcagatgtctgaactggaaatacccatatggcagtcatcaacacacagatacttaaatcccaaaaaactactgagattacttggagagttgagaggaagcaagaaaaactcagaataagacctgaatccccctaaatttaaaggtaagctgcaagcaggagagccatcaaaggagttggaaacagtgtggccatgaggtaggaagagagcaagaggcctcagggaaaccaagacagcagagtatttccaggagggagtggtcaaatgtattgaatgctgttatgaacttgagtaagatgaaggcaaagtggtttttttgttttgttttgttttttaaagcatctttgtctttggtaatatgaagctattgatgaacttgacaagagaaacgtcagtggagtgaaacgaacagaaaccagattatggtagactgatgagttactgggaagttaggaataggtcacttgtcagtgaccaccttcccttaggtgatagaggtccttccagagactgcttaaatatctcctcctcaaagtctggtgtggtatgttttattctccacacctgtggagaaatcatcaaacttttttaagaaaatttattttctttagacatatatatatatatatatatatcattttaagatcaaaaagatctgataaatgagctagttgcttgcttttttcccttgtaggaaaactgaggccttttaactcacttgctctataagtttacacagttacttaacttttctgtgactcagtttactcctaaagaaaatgataataatagtatctatcttctttagggttgctctaaacattaaataatctatataaaattccttgcatggtgcttggcacattgtaagtactcaataaatgttagcttttcttattgtgatgattctgaaataatgtaaataccctagtgtaagttacatattacaaggttacgtagcaggcaaaaacgtaatgttgtctattcattacaactgttttatttatttttcccagtttaaacgatgttagaatttttgttattattttgttcatttcaaaaatctgtagaccaaataatctattttagggagggtaactttgtcaagcatttaacatatagcatttctagtcttattgcctcaactgtaatatttctggccaggccatattaactttttttgaactaccagagtaaaacctatagctaaagtgtatatattttaakatttatcctattaggcattttttggtaaacaaagttaaccatgaatrtagtaaatgcagtgtgttttatactgtgtacatgcagtctccagttgaaaacaggttgtgttccacatggcttggaccatcaatggcatagtcaccaagagagtggtgatagcctcctrcagtttcctagtaatatttcctttagagtacaaatctcacttaagaactgactttgtggtatatttttattaaaatcactattgtaaaatcactgtttgtaaacttactctacactagaatcatgaataccccaaattttaaaatcacctacagtaaaagcctgatctaatataggatgtaagatagatgtcagtatgtctatcttatatgaaagttatattttattcaaacaaaaaaatctaatttttgtaatccagaaaattaaatcttttactttaaaagaagaatacgcattataaaaatagaaatactaaaacccctgatcacacagctattcttattgtagcttgagaacattttacttatatattgattttaatttcttacagaattaaaatttttgtgcttttcttttttttgaaggggttgtagctcaagcaagatctgttcttgcctggcacagtcgatacaagttttgcccaacctgtggaaatgcaactaaaattgaagaaggtggctataagagaytatgtttaaaagaagactgtcctagtctcaatggcgtccataatacctcatacccaagagttggtaagccctttattttatatctcagccacctggatcttggggaataagatattttggaaagagaaaatttgtgaggagctaaagagttttcctttttatggaaaacatgtctaaccattaagaatgtgttaaagtgttacanactttcatgatttttaagtaaaaaacatggtacatcaatagccatttcttaactttgggttactcactataatttgatatgttatgatacatgatttcaaaagccaaccaatttggctctacttagtggagaaaaagccccactaagtacaatttattgcctgtttgaggcattactaaagcagtacagcctggccctagcttttcattactgttaatgtctgcctgtattctctcttctaattgctgccttgagtctgctgtagatttggaaatctggtaacccagacctttaaaactgtgtgaaagaagaatagataggctcagcaacacctgaggaggcctctggggagaaaaatacatggcttagtgacatctatttttgttgctcaagagccttttacatttaattcctagttcttggtcatgatatagtgagaagaatttgctgaattagtaacttctagagagatgaactgttatttaaattttatttaatgactttaatcatagaatcacattagcttttaaaaacattttgttaagggttaggatggaagagggaaattaactatttaccgtggtaaaatttgaattttccttatttccatgtattacctactcaaatttttttctcattaaaaagtaataatacacctaacatccataagtacagaataaatgttgctgttaagattgggggaagaaggacaaaaatggtcttcctttagcttactgacactattctatacaatttccctgagatattctattatcagctacattagggcagaaagaagcaatctcttacaaccagacaagagttctatccctataggagatatacctttatattatcctatcagacagtgtttgtacaatgaatctaaattcgtttttcctgccattcatgtatctgattttttttttcaacagatccagtagtaatcatgcaagttattcatccagatgggaccaaatgccttttaggcaggcagaaaagatttcccccaggcatgtttacttgccttgctggatttattgagcctggtaagccatttcttaataatttatatttaatttataattttaaaatacaaagtttaggtaacatttgagaaataatctctgataaattatcatgttataaaactcggttattttaaggtattttaaaaatgatacaattttaataatataaacatgtaattctcatgttttatatgagaattatataaattacttttcctagtaatttggtctgctttgttaaaaattcagtatttgctctttgatatgttgctcttgacccaggtatctaggttccacctcatttccttctgtactagactcaactgttaccttttcaaagaggccttgcttgattgccccagatacattagttagcccccataccctgcattcacaatccctatcatccttcctgatttttccctatggcactcatcatcacctaataccgtatgtawgtatgtatatatgtacttactaatttattatctkmtgtttcaagaatataagtttcataagcacagggactttattttatccactgctgtatctgaaaccctcatagcacatgcctgtagcacatgtagtagaaagtcagtaaatgtttgtggagtgaatgaatacatctaattaatatgttttatctcaatttcaatttccaatatttgcattgctagataataacagtaaacatatagtatcaggctgtgttttggaggaggatcatatcatatatataaaacagtatcaggctatgctttatatatattttttgtatgatcctyatacaaccttataaaatacactattacagtgattttgcaggtaggggcactaaggcatagggactaaataatttgctcaagatcaaacagctaataagtgataaggaagggatttaagcctgggcatgttggtttctgagttcttgctccaaatcactatgctgtctttagtagttctaggtcattgtcttaactgctgggtagtaatccattcatggatattccactatttatccattctgctgattggacatttagtttattttaaagttcttattacaaacagcactgcaattaatatttttatacttctccttgtgcacatttgcaagagttatctaggttatatacatagagtagtacsaccagctcatgtgttatgagcatcttaaccttttctgtatgttgccaagttgtctctgaagtgtttctgccaatttacacttcctccagcagaacatgaaatgttccattattccacatcttcaccaagttaggattttcagacttttaaatttgtcattctgaggagtgaatgaaatcgtatctcgttttcattttcattttcttgcctatggaacatcttttttcaaatgtgtattaggcattcagttttcttttctctgaattttagatgtttatcttttacctagttttgttttcattgtttatccttttttattcattttaagaattcttaaatatgtagcatatgctaatcttttgttagttatggttttgcaaataccttacactagtctataattatatttttactatatgtgttcttttgattattwtaagttaattttcatgtaggaaatttatcaatctatttgaaatagaaagctatatttaaaatatattttgctaaatacagcaatatttagcaaaatgtttctaaacttccagattttacttagaaatgattttacttagaaacaatttcccctattctaattcttaattccaacaaattagaaatataaagtacatttataggcatcacttaccatagcagagtcagcagtcatctagaggaaaataattgcttagaaaaagtattaaatttcatcttatgtagtttgtaatcttgtaatgacctgaaaagagttacctgcaataattgtttgacaacataataaaaaaaagtttcagaattttagtgtgaaagagctatttgtaaaaatcatgtaatttataactatttcgtggacaatrtatacatgagataagatataaagtgtttgcatagtgtttaaccagtattaggtattggatatttttagatggtatcattatttttaaaatgtaactgacaaatttgtaccttaaaaaaaygaaaagtttattgttggcattttgatattctatatgtggtcatgtactttaaaaaaattgttttcttcaattacagtctagttttaggcttctgctttctgattatttgcattgggtttctgtccaaagtgatttccagatgtttgaaccattcaggacacaaagtgtcccgggcatgttcatcagcaacttgttcttttgctccatttcattaggagagacaatagaagatgctgttaggagagaagtagaagaggaaagtggagtcaaagttggccatgttcagtatgttgcttgtcaaccatggccaatgccttcctccttaatgattggttgcttagctctagcagtgtctacagaaattaaagttgacaagaatgaaatagaggatgcccgctggttcactagagaacaggtaaagttcaatttaatttccttcttctattgattgttccctgactgtattggtttggtcacagagcaaggatgcatattttcagcaagttgaatgatgcctttggccctctcattatgcatrgattacatggtaattagtaattccatacaggaggagtatgtttcactaatgtgatctatattaacttattctatgagatttttctagtagagatgattctgtaccatttcgagtttcagattccattccttcacataaataataatacctatcagtgggtttagaaaaacattaattcatagatgagaaacaggaatattcttatacattttatattttagtttataacattaaaacaagtagctctcaaaaaacatcagtaagtgcttaaaattttcagaaagtttttattcattttaaaatgtacttaaggacaagaatgacataactgtataataaacatacacttaaaataactttytaaaatgtcattcctaaataatatattaaaagataaattactcatctgacctgaaattctttctgactttgcctgcataaaattaattttattctatgcttaatcctaaaagatggaaattagattattgcttatgaattttataaaaaagaatctgtttcaaaagttggctttgcttagaaattaagtgtggagcgtacattttgctttttcgtgatgtcattttcataagggaatgtgtctttctggaacattttagaaactgaatcacttactcagtgaagcaattaaaaatgctgtcctaaattttgcatgttgaggcrgggcgtggtggcttatacctgtaatcccagaactttggaaggccaaggcaggaagcttgattgagcccaggagtttgagactagcctgggcaacatagggagaccctgtctctacagataatttttaaaaagttagccaggtgcacctatggtaccagctacttgggaggctgtggcaggaggatcgcctgagcccaggaagtcaaagctgcartgagccatgatcccaccactgcaactccagtctgggtggcagagtgcaagaccttgtttccaaaaaaaaaaaaactttgcatgtaaatatggatgttgtcactttctactgttgttattcactgtaaaactcatcacattttaattgaattatgtaaacatgggaatagtatttaaatatgacagctttgaaatcctaatgcattctattatggtgtgttttaggtcctggatgttctgaccaaagggaagcagcaggcattctttgtgccaccaagccgagctattgcacatcaattaatcaaacactggattagaataaatcctaatctctaaatctaagaactaagctttgagtattatttaataatttctaataacactcrttcctcaagtgatattagagattattcagtactcttgagagtgtcacaacacaaaatacgatgttgggttttcgaaatattttcaaagtgttctgtcttaatcacaaattcatatttttacacatttttacaatattgcctcagattatgttaaatttgggtcagtcttctctgaactttttctctcttggtttcttttcttccttcacagttttatctcacaaaaccatttttctaataagagacatcatgttggaaagatgttctagaaatgtgcataaatttcagtgcctcttgtaagcattaaactgatgatgaagaaagttcctgatttgagaaatgaatcaaagtaattttaatgaatttttagcttgtattagcttgagttagctggcattgattttttagtccttttgttacctttaagttgtcaatatatggtttttgttcatctccccattgtagtcccacttgctctttcctgggggttccattgttctagcagtggaggtgttayagtgtcgccactcrtctaatttgaccagtgttaagaattttctaatttaataatttaatagtgatctcaataccacaccctcatggaaggagaaaagcatactattatatctgggacctctcttttagacctaaaattaattaacatatctacttatatgttacttatacctaaagctgttattaagacaaaccaagattctctgcttttgcactgaaattaaacttgaaaggaattctcctcaaaggtcggatattaaataagtcccaggcagatttacatatttaatttaaaacattggctttatttcattttgtgatgagtgatgtatctgtgttaacaaaaaattgtataatcattaccaatactatttattatgctcaaatatatcttggctttgaccttatttcaacacattctaagaagccttgacaaagtaagtatattttagagctgaatcagtaagattctagagaaagcaaaacatagtagttcacaattttgcaacatagaaagtcacattttgaaaggctattttgaaattgatttaatagctattatagtttatgaatatcaaaatttgtataatttgcatctttactaatgtatgctagagctacaagagaccttaaggataatatatgaaattagctttccttattttatagataaggaaaaagaaattgtgaaaggtgaatttacctaattagtgaaagttacataactaattacaacagtctgtactatataatgcagaggacgattctccctgtaaaaggaactagaagctattactaaaaatatatatagacaaaattaaaagaaggaatgataagaataaatttaatttaccaaatattgttaattaaaattttagatacttaacatttatttaacttaaataaaagataactgtcagataaaactttattttactaatgagcagtgattttcttaggaattgatgaaggcttattggtatcaagaatttaaaccaaattaaaactgacagaggacatttagatacataataaaattcgagctacataagtatatggaaaataatgtaccttgattattatgaaatagagcatcttgaaattcagttttactctaaatgtacttttaatacttgcagattctaagattacattgtaaaattccaggttttcataatgttaaaataggaaagtagaatataaagtatcaacaagtgtagttatacattttgttttggatatttaatccttacttgggaaaaaatcagcatctaggtaaattattattttaataasaactcttaaattgccaacctctgagaggtgaaaagctatgtaaatagaaggaatggccagttcaaaagaatagtagatgtgatagtgccgtgaatgtattctactggaaatgaatgtaataatacattaaatttttaaaatctattttgttttgtgtgtgtgtttaacatgttttgacaagtgtcctgaaaaatgagaaaagctggatttcaatcgttaacctgtttcgaattgataatgtacaagaaatgcaaaagcctttttaaaagtgtctgtgtttgggagacttaaaactttgatttgaatcttaaagtatagtttggggtcaaatacaaacagacttacatatatacatacatatataaagtcaataatttttgttcttcaggtttaaagcgatatatctaatttttattacttgtctaatactgctaattgttggattttgatattttcacatgttgatggaacatgaagagttagaagcccacatattttatttagttggaaaaatgagaaattcttttaaagacccagttagggatttggctgaagacagaaaataataggataacaaagggagagaccaagatggaaggaggaagaataagtttgttaataagccaaattaatcccacataacaacaatagatagctggtcctggaactgtgttgctaatgtggatacaacaaaatattaggtgaagatgttctataaaacaaatccattaattatttagagtaaaattttcacagtgaaaattttattagggctgagacccagttattaggttctggggggggggagggagggggagaaagagagagagagagagatgggtggtgggtattgagtgaaatttgtgtatttgttgaggttaaaaggggctgttatctctattagaaaaaaaaatatgtaggacaaaataaatccaatgtgcaaaattaggagtctctatcttcaaatatataagatctaggtcctgaggcaaagcaagagtagttgccaagaggttggaaaaggcagggaagtttgatattctgtgcagatcggggagggtgcttgataaagtgggggcagatgcttgagagctttaagcccacaggagcagatgagacaggctgtattttggggcaggggtaataatgttgccaagtacctgcatcttcaaaatgagtcattgattagaggaattacttgtgaacataaactaaatactaaaaaaatatttttttcctacactataccctaccatccttccaggacaatcaggatagaattcaaaagaatttctgaaagagggagtgaattttattatatatgatagattttcaaataattccatttatttgcccaaaactagaaatggtcaaaaggaaggtcatttaaaaaataaggatggcatagggaagacaggtaatcagcaacctgaattcttgtttgagaaaataatgaattttcaactataggatgaatatttgggcatgttaattggcctaagaggcaaattactcattctatttttactgaaggatatccatatatatagttgtattcattgatggaagtgacacttttaactttatttcttcaagactactcctttttttttttcttgctaagcagtcaaagccatagcaccagacaacaaatactcctcctttttgcaactcctggcatagtgataactctgcagaatagtgggtcagatgtgaaattttaaacagattttaagttggggagggggggaaactttctcctaatggaaatatttttctttctaactagaagtctgataagagacagacaaactcagcataaagaatgaaaaaatgccctgactttccattcctggcccatgggaactataccagacaaactctttgcctcacctgtggaggattaagaacattcttctaaccacttaacttgtgaggaggttttatttttagtcatgtggaagttccacccagcagtagaaattgaaaatggtactcttgtttattttagaacagagtaagtggacagctgatccagtctgaagttttatttttgtttacttttatcctgcccatttcactctagcctgaaatcgtctgttggagcagtgtgatgttccgaatgtctcagtagagtactttataaatatttgttactactctcaggtagcagtgagctgaagtcatctctatcagtgggggtaacgatttaaaatgccatttatgcaacagctttactgctaagagttattttgcttttttgttaggtttacttgtgtttatggaacaaatttgagtagtaccaagcagtttggagaatttggaactagaactccaaagaaaagatgctcaaggatgtgtgcaaattcaaacctaaggtgctttgttggtcccaaccatcatcccttctctgtatcatactgagggcttccatgggagtgtatccgcaggtgggaagccacttggaactctgtgtgttctggggtaacaggagaaaatatgcatgtatctgtgtggacctcaaagttttcatggctgtagaaatgtctaataattattatttccaaaaaacaccatctttttctacaaattactaggcttgccataccaatctttttttttagttcccagccacttcctacatcctcatgaaaaataaacacatttttcattctattataatggtaaatttatcatataaagagttttgttttatacagtgaaaatagtacatacattctccttgttcagtatatctaacatcagtactaatgtaatttttgcaaacttagacttctggacattataaaagttattttttacctgttgtttacaatatatttctaagaattacagatctctatttacaacaagcttttaaggaagcataactgtttagcttattctcataatactagtaatttttacacatgactctatatatagaaggttgacagttattttatccttaaccccataaaatgaatattagtattattattcccattttacagttggctaagatggggtaacttccaaagtcatggtgttaataggacagccaaagcttaagcccaaatactttactccagatcctttcctttcttaccagagctatcttaaagacgttttctaataactgcattgacaaaagcacttccagtctcagtttccttctttagtctcctaaattttgcttatttttcaggttgagtcttctcttgttactctacacatttctgcaggacattctttggatcccacatttctctgtccaactgtccaacacacctgcttagatgtcccagagcctcccaaatactgcatgtctaaaattaaattatctttccccaagcatcttcctgattctatattcctgtattattataatattgcctaacatggaagtttgggcactgttttaatttgtctgctttatcccttaccccactctactcctcagccaaacaatctcttaaatcctgtcttcttaatgtcttaatacttcttgaatcttgatatctccctctctttccctctccatcttctgtctctccctctgccaccatcctacttaagatcattcatctggtttctgcatcagcctcctacactggtctccctactttccagtttcactcccaatcagttcttcacactgcagccaaggagatcttgctaaggaacaatgtcatctagtctttgccttacttaaaactcttcaaaataatgcccctcactgtccttggacaaaggaaaagtctaatttccttagcatggcaatttacctcttccatttcaactttcatcattttcctttccttcaacctcttactatactatgacttatgttcttgcagagccatagacaagcctaaatttttgttatgcattaacattcatttaggaccacctgagtaattatggctaattccatatgttactagtataaatagaaataatttttcatttatttaatattctaaactgtacttctaaactatattttcatttacatatctcatgggattaaaaaacttctatatcaggaactataatacttatcccagttttacaaatgagcgcactgaatctaagagaagtcaagtcagtttcccaaggtaaacatgggatatggaaaccgactgaaatttaagtcttctgaatcaaagtctgttacctctaccatactatatgccatactgcttctgccccagtctactacacaaacgtaaatgaattacctaatatttagcccaacccatgtgaaaagctgaactagatcatctaagtttttgtttctgtttggcttgcctctatttcatctgcaccgtgtgaacgtcataggtgtgtttaataaataccactatcaaaattctgaagccacaaaagcacacagtgcatcattgtttactaaaagtatatttgaatataaacagactgttaggaatggttaggacagataatagactcgttaaaggatgggtgatcatgcctgatgctgcttaagattaaatatgctaatcagattttggatttagagaacccagataaatccaaagtagagcaagaaaaggtactcaaatcttcagcttcttccttttcgaaaatacatactgcattttatccatgtctccttcagaactgagcaatttatgaaggctttacccaggtgagctgattatacatgcttttttcttcctttttgaatgccatattctctatttcaatccttgccattctaaattagttccttggcaaaggataatagcaaagggaatattatttgaatgttatatgtgaagacaatttaataacatttctttcctgtcacaaaatatccaacagctgtttgtaacttactttgttaccaaattgagagaatggatacatccaaagaaaattctaaataatcaatgtgtttaggcctcttttatttatgctaagaaagacatcatgtgcacatttgaataagcaccatccatatcctaatttggttacttcaagtaaattgcacatttggaaagcaaggaaaatgcaactgacaagctaggcttctaaacataattgaaattcattctgaatgcaggaagggtcagtttcatttcaaagcagtagaccttgttttgaattcctatattctgctttgtatccattgcagcattagatttgttaatcaccaaaatgattttttcatctggttaagttagtagaattttcttcattaattttatacttaattttacttaaataaatgtttatatttaattgtttttatattaattacttaaaacattttgatctgatttcatgaaagaagacatttaggacgttgaaattttttctattacaattgcagttactctgtgatttagaacaatttcataggcaaaatattctggccaacatctttttgtaaataatcccaaatcaaactgcaaaacagcctatttacaatcttgctgttacttaatctttacatctggttatttcaaacaaattgtgcatttggaaagcaagattttttcagtgaccacttactatgatttttatggaaattaatacttgctatgaaagactcttttcaccattaagaattcagccagctccttttaccttctccgtgctcactcagaatttaaatattagatatttttaaatctccttttcctctcggataatttaaattttagctcgtttatctaatgtcagattaaaatgatgttaaataagtattcctaaattatatgtttggaaaataaattgaaaaataaacctttattatctatatttgttttaagatataattctcttagttgctagcaactgaccatttaattatatgtaaagtcatctaacttcttaaataaatctgtactaatcatgtgatgaaattacaattaggatgcttataagatagtcttggtatcttctctctaggggaaaaaaatcatccactgaccaagttttcaaaaagatctttaaaatgacaccaggaatttcactgtgttgtttcagatcttcaactcttactagatgtgacgacactttcgtggtcccggattatttttacaaaaagtagaataaaaattctgaatgttatctgatttgtgaagatgtacacacactacccaaaatccactgataac

SEQ ID NO: 95761 - DNA, 28498 bp, Homo sapiens
tcagaataagtgtcaccatcacccctccacagggcaccctgggtttttcctttggagctctactaccactttaaggaaattattatttctgtgattatagattagtatttgtctccacaagagcagagattcaatttatatttttcaacaacgtatctccagacaccagcatggagtaactttttagttaacaactgcaaaaaacaaacaaaaaaacaaacaaacaaacaaaaaaaaaaacaaggaaatcaatgaaagtcaaatcaaattgcccatacggtggcataatttccaagatatattggtaagtgagaagagccaggtacagcaggtacagaaggctatgtctaaatagcatgctgccacttgtgttaaaacaacaaaaagatgcaaatgcatatacaagacatgtttgttcagcctcagtatctctcaggaaggtaacgctgattgcctctatataataatgcagtgggccaggcacagtggctcatgcctgtaatcctagcactttgcaaggccgaggagggaggatcacttgagcctaggagttcaatatcagtttgggcaacatagtgagacctcacctctacaaaaataaaaataaataaatacataggctgggcgtggcacctcacagctgtaatcgcagccctttggaaggctgagatgggtgtataacttgaggtcaggagttcaacaccagcctagccaacatggcaaaaccctgtctctactaaaaatacaacaattagccaggcgtggtggtgcatgcctgtagtctcagctccttgggaggctgagacaggagaatcacttgaacccgggaggcagaggttgcagtgagccaagattgcaccactgcactccagcctgggtgacagagcaagactccatctcaaaataagtaagtaagtaagtaaataaataaaaatgaaataaataaatagataaaaaagataatgcagactgggcacggtggctcacatctgtaatcccagcaggggaggctgaggcgggtggatcaccgggtcaggagattgagaccttcctcgcaaacatggtgaaaccctgtctctactaaaaatacaaaaattagctgggtggggtggtgcgtgcctgtaatctcagctacttgggaggctgaggcaggagaatcgcttgaaccagggagtcaaaggttgcggggagccaagatcgcgccactgcactccagcctggcgacagagcgaaactccatctctcaaaaaaaaaaaaaaccaaaaaaaaccaaaagctaatgcagtggaggtgacccttttagtcccttctgtactttttgaaaatatttttaattatgttaaccactcaaacacaaaaacactttttatttatttattttgagacagagtctcgctgtgtcgcccaggctggagtgtagtggcatgatcttgactcactgcaacctccgcctcctgggttcaagtgattgaattgtgcctggcccaaaaacacttttaaaattgttcaccttcaaaaacaaaaacaggtccagcatggtggttcatatctgtaatcccaacactttgggaggctgaggcaggaggacagcttgagcctaggagttcaagaccagcctgggcaacatggcaagaccctgtctctacacaaaaaattgaaaaaaaaaaattagcctggcatgggggtgcatacctgtagtcctagctacttaggaggctgaggtagtaagattacttgaggccaggatttcaaggttacagtaaactatgaccctcccactgtactctagcctgggcaatagagcgagaccttgtctcctaaaacaaacaaaacaaatcccaacccaccaacctgcttatcaaccctccaatttcctttcctgctgctccagcataaatccttccttctagctaagcaggtctcctcatggcttttgtatgtgcgtgcaaacatacatcactgcttgcttttttttttttttttagagacaggatcttactctgttgttgcccaggctaaaatgtagtgtgcagtggtgcgatcatagctcactgcaacctctgactcctgggatcaagcaatcctcctgccgcagcctccagagtagctggtactacaggcacacaccactatgcctggctactttttgtattttttgtacagatgaggttttggcatgttgcccaggctggtctagaatgcctggcctcaagccatctgcctgcctcagcctaccaaagtgctggaattatacgtgtgagctgccacaacctggcccctaattttaaattttgttttgtggagacggggatctcattttgttgcccaggattatagtctgggctggtctcaaactcttcatttcaagcaatctccctgtcttagcctcccaaagtattaggattacaagtgtgagccaccgtgcccagcccatcactgttttctaatagaagcacgtcatgtttacgtctgtactgactcacaccatttttacctccaggttattaatcttcttgtggcaggcagaatggtcccttgaagatgtccttgtcctaatcctagactctgtgaatacgttaggttacatggcaaaggagaattaaggttgcagatagaattaaggtggctatcagctgacttcaaaatagggaaattatctgggattatctgggtgggcccaatataatcacaaggatccttaaaagtggaagagggaggcagaagagggagtcagagacgtgatgacagaagcaaggtcagagtgatgtgatgactcaacctgctactgctggctttgaagatggaggaagggggccatgacccaaggtgtgttgggcagcctctaggaggtggaaaaggaaaggaaaaggattctttttttttttttttttttttttttgagatggagtctcgctctgttgccgaggctggagtgcaatggcacgatcttggctcactgcaacctccacctcccggctgcaagcaattctgctgcctcagcctcctgagtagctgggattacgggcatgtgccacctcgcctagctaatttttgtatttttagtagagacggggtttcaccatgttggccaggatggtcttgaactgctgacctcaagtgatctgcccaccttggcctcccaaagtgctgggattacaggcatcagccactgcasccggcgggaaatggattcttacccagggactccagaaagaaatacagccctgcagacatcttgatttagcctgctaagacctgtgcctgacttctaacctaaataactctaagataataaatttgtgttgctttgcaccattaaacttgtggtaattcactagagtggcaaacagaaaaccaatacaccttctgacagytctccatctttgggggcccagctcaagcctccctttcactcttacgtctctagctcgcagtgatttttctcttctgagttcccgcagcacctatttccctgaatcacatggttagtacttgataactcactcattcaataattatttaatgcctgctatgggccacaccttgtgctagccacctgagatggtcttcctgaagggtgtttacgggcaactgtggttttttttttttttttttttttttgtattcctctcattgcttagcaaggtcctacccataaaggacaaggtccaaacacctcacaatggtccctaaagacccttagactgcaaatgacttcatctcctgccaaacatggtatccctcactgttactctaacatgccaaccttctttcatgtatctttgtctttgctcctgtaggtccttctgcacagcaacttctggtcaaatgcctccatggtactcagtaattaaccacagatctactctagcactctacattcattcacagcccagggaaaccatcaattccagtgtgaagacttcccccacctcccaggcatttgtcattcatttctttctccgtacatttcttctttttttttttttttccacattccttttaaagcatttatcacacaccagtttgcttgagttcaagtttatcctagttctctggggatagtttgaacacttattcatctttatgtcacctatacccagcatagcactggacttcagaacagtggaaagaatatagcctggctgtctaattgaggagctttggttgagcatctcaatccaagtctcaaactcggatatgctttaactctgagttggcccgcatgctctgagttaaaatttgaactgattcaatttttttaaatgggaaaatccacataaagtgtggatttctgacaactcttgcccaaaattctggcaacactagatctttattttcatatggcagccatcagctggagctgattagatggcatctactctccatttggcccatttcacacttctgttgtccctagcacaaagacctggtgttggttgctatttcatcattctttttcttaaagtaaaattcaaagttaaaactttcttacattgggttgtttcacctaatccctgaaggcatttgagttttcaactcctgtcttaacctctaagcctgrcttctcatctgtcaaatcttctcatctgtcaaatgcaaaaaaataacatttatctataattctgaaaaaaagccctgcagggtaaagcatgcatagagaacactgcctggcacatggaaagtgtttgaaaacggttaatataaggagctcaaaaaccatttacaaaatgaatgaatagaccaggcatagtggctcatgcctgtaatcctaacactttgagacgccgaaagatcgcttagtccaggagtctgggaacagcctagccaacataacaagacccagtctgtacaaaatcaaataattagccaggcatggtggcgtgcacctccagttccaactacttgagaggctgaggtgggaggatcgcttgagcccagcagttgaaggctcagtgagctgattgtgccactgcactccagcctgggggacagagtgagaccctgtttcaacaaatatataagaactaaaaactgaatgaatgaatgaacgaacattccaacgaccatgtgactgttttgtaaagaggagactgatgaaggaaattatcgccaaggtgtttttatccgtttatgaaagccatactttgtatttgggttgctgcagctgctcaaaacaatgggagaaactgcagttataaattccagaaaagcctgtgaatggagtgaaagtggagtgggtggtcaaaaaccaatggccgtggaggcttagctctcttcacaaggcacacagcaggtgctcaatgagtgcctgttgaatgaatggccacgcagcccaatgcgtgcctatgcacccctcctcctccaggcagccctccggaggtccagcctcctccccaccctcttggcccgccccgccccgcccgcccttacaggatgtcttcgcggatggaggtgccatggttgaggttgtggaagcggacggagacgcagtccctgagaatgaaggagcacctgttctcccttttgtaggcgctgaagcactccttgaagtcctcataggtcttgaagcagctgcccagctccatggccgcccccacaacccacactaggggctggtcccagcccgggcccaagatcacaccaggggtcaaaggtcacactatgagggtttataggcaggcgtgggcccagaatgccttaagggtccgccccaactgggtggcctattctggaactcagggaggaaccctaggcctgaccgggttacaagaggaagggggtgtatttgctatctgacaggggaaatgacactcagtccatattatccagtcccgaggttccgcctcctcagcgacatatccagtcacacacaggattcgcagattggcattcattttctccaattgctagagaaagagggccacagccaccagcggactgacaggagwcctgaccaatcataacctagattcctccttcccggggtctgcaggagacttccggttactagggcaatctgccggaagagtcaggttctgtgtatgtctccgcgtcttccgcggagcgggtgtgcagggcctgcagcattgaactagatgtygtccccgcaggccccagaagatgggcagggctgtggcgaccgcgrcgatccccctggggacctccgtagcgtcttggtcacgaccgtgctcaacctcgagccgctggacgaggatctcttcaggtagccggcagctcctgcccagcatcccctcctttagggcagaaacttgatcttgactgccgccgcccggggcccctggctccgggactagtatggctctgcgtgggatgcaccctctgccacgattaggagagaactcgcccccaacagagctgtcctctctgctctggcttcctcccttcctctccgcgctgcgaggtctgcacagctgagcaaatatagtggtgacctgagagaccctgctcggcagcctgccctaagccttcacgggggagctagcccagagagggcagtgatttgcccaagggcacacagctgatggatcagccttaaaaccgacgccgcagctccttgtgtcttcagtatccttttcttctcacaatatcccgcccccagtaccatttggtgggtctggtttctcattacttattctgaggcctaagcatgtttttttctttcccagcatcgctgaagttcttgactgcagcaagggtttctttctttcttygaggcggagtcttgctctgttgcccaggctggagtgcagtggtgcgatctcggctcagtgcaacctccgcctcccgggttcaagcatttctcctgcctcagcctcctgattagctgggacatacaggcgcgccacagcccagctaattttttaacttcttttagtagagacggggtttcaccgtgttggccaggcwggtctcgaactcctgaccttgtaatctgcccacctctgccaaagtgctaggattacaggcrtgagccaccgcgcccagccccctgcagcaaggcttctaacagctttgacctccaaggcttctcctggctttactggaagttatcttactttgagctcccttccttccacttaaggaattgtaaataacttcttggagggctatttgatttttgtttttgaagacaagatctggccctgttgtccaggctggagtgcagtggcacgaacatggctcactgcaacctcgacctcctgggcccaagtgacccttctgcctcagtctcccgtttagctgggaccataagcgcttgccaccacatccagctaacttttttatttttagtagacatgaggccccactttggagcccaggctggttttgaactcatgggctcaggcgatcctcccacctcggcttcccaaagtgctgggattgattacaggcgagagccacctgccaggtcatggagggctgttcataactcattgttacagaaaatgccaaacagctgggacgtgggaggctagagacataattattcagcttccaatgggcctacattctgggcaagcattttcatctctggggccaagctgcagttttctcatctgtacactgaaggagttagacttgatgtctgagggctcttgttatttattcatttatacatttatttaattttattttttgagatggagtcttgctctgtcacccaggctggagtgcagtggtgcgatcttggctcacctcaacctctgcctcctgggttcaagtgattctcctgcctcagcrtcctgagtagctgggattacaggtgcatgccaccacgtccagctaatttttgtatttttagtagagatggagtttcaccatgttggccaggctgctcttgaactcctgatctcaaatgatccacctgcctcggcctcccaaagtgctgggattacagatgtaagccactgcgcccggcccagaggatttttatgcataaggatatttgcctggggaaaggacctatggcttttaccatattctcaaaaggatcttaaaccccaatatggtgaagagatcatgcattagagtcttagtgagggtaktagaatttggcccagttcccaagtctttccctctttccccctctccctacagaggaaggcattactgggtaccggccaagaggctgtttggtggtcagatcgtgggccaggccctggtggctgcagccaagtctgtgagtgaagacgtccacgtgcactccctgcactgctactttgttcgggcaggtaaaccccccacttcctgccccaacccaaccctggtggcccagcagccatttctggccttgggggctgaggtcaaaagggaagagagggagactggaagacaaggggaggggtggcggacactaccaccctaagaggtgtctagggtggaacgaggtctggggctaacaatgagccttggacctcacacctgctgggactcactgggtacctgatgtctggctgataatgacacaagactttgttgcttaactgctccttgtgggcttttgttcttccattcttaacatagctcctggtgcggagcgctgtgctaggttctcagtgtgctgtgacctctgctagaggtgtggaggtagggcagcttgggttggagaagagagcaccagcctgagagtcaagggatctaaggcttcttttgtcaactgagcatagggtcaataaaaacaaaccaaagatgtagggcctagcttcagttttgtccataatttaccatgcagccttgtgaggttacctccccgccctacagtttggtttacttcagctgtaaaatggagaagggtgggaccaggggtattttagtgggatgatctctacagcttcttacagctctggggtcagataatgtaacttaaaacctatgtgtgaggccgggygyggtggctcacgcctgtaatcccagcactttggaggccaaggcgggcggatcacgaggtcaggagatcgggaccatcctagctaacacggtgaaacccygtctctactaaaaatataaaaaaattagccaggtgtggtggtgggtgcctgtagtcccagctactcgggaggctgaggcaggagaatggtgtgaacccggaaggcggagcttgcagtgagccaagatcgtgccactgcactccagcctgggcgagcactccagcctgggcaacagagcgagactctgtctcaaaaacaaaaaacctatgtgtggtggctcatgcctataatccccgcacattgggaggccaatgcggagaattgttggaacccaggaattcaagaccagccagggcaataaatcgagaccttgtctctacaaaaaaataaataaaaggaaaataaaagcaaaacctatgctaaaaaacaaacaaaaaaaaccctcactgttttctttccttccctgttacccccagagcagatgccctcatgtgttctgcgtagatccccagctgagaagagtttgtggacctttacagtatgtgatttgtattaagaaaaccatggggtttcccccttcattttgtaaatatgaaagttatccctgtaatggtaaatacactttttcatactgtcccgtgtctcttactcctcatccctgaggagtattgattggcccccctcttctcggcccccagtcactgctataaagtatttgaatacttaccttgggctcagccaggttcttatctttatgctagttgggagtaaatatgtgctttgtttctttaatttgtttgtaagtaccagccttttgatattgtaatccttccagcctagtgaaatacctggctgttttcttttgtgtgggtgggggcattacttgaactctgaatctcttcatcctgtgatggaagaattcaatgagtctttgccagtaaagtatctagtgcagggcttggcataatctagttttccataaatattattagtttttgatgattaacttatgggaataattaaaatttgcatgatacagagcatagttgtgtgcattatcttgtttagtcttcataagtaaacatgggtggcaggcattcctgccatcattcttacctaaggaaactgggacctgaagaggtttggaaccagctcccacagtgcccaaggaggcagagccaggatttgaacctggtttatgtgtctttgagtgccaractctttcctgyttctttgcttcgctcttgggcaataattctaaacaatgagagagctgccagggtacccatcccaggttctggggaaaagatcctctttcttggaaagtcttcatccaggagcagcgtgaaatgagctgtgtccaagccaccatttcaaaataaataattatttggccgggcgtggtggctcatgcctgtaatcctagcactttgggaagccgaggcgggcggatcacctgagctcaggagttcgagaccagcctgggcaacatggtgaaacccagtctctactaaaatactaaaaattagccaggcatggcggcatgtgcctgtagtcccagctactcaggaggctgaggtaggagaattgcttgaactcaggaggcggaggttgcagtgagctgagatcatgctactgtactccagcctgggcgacagagcgagactcttgtctccatcaaaaataaataaataaataaaaataattatttgtgcccttgcttgtgtcttgaaaggctgcaagatagctaaaataattggtagttattatgggaatattaaaagtcaaaggacattaggccagtagtaatgggatttgggagaagcgatcatgtcaaaaaatttggctaagccatattgttgcagtttcatacaaggtttagttctgagcttcctggctgcaaggcaaaaaggggagagctcttatctgtttgtggtgtgactctgccagctatatcagatattaaaaccaatgctgttttttggctgggcatgtggcttatgcctgtaatcccaggactttgggaggccgaggcgggcagatcggctgaggtcaagagttcgagaccagcctggacaatgtggcgaaactccatctctactaaaaaaaaaaaacacacacaaaaattagccaggtgtggtggtgcacacctgtagtcctagctactcaggaggctgagtcaggagaatcgcttgaaccctggaggtggaggttgcagtgagctgagatcgtgctactgtactccagcctgggtgacagagcaagactccatctaaaaaaaaaaaggaaaattagctgggygtggtgaccttagcccgtgatcccagctactcgggaggctgaggctgaggctgaggcaaggagaattgcttgaacccggyggctggaggtcgcagtgagctaaaactgcgccactgcactcccacctgggcgacagatcgagactccatctcaaaaaaacaaaacaaaaaagagatgtttcaattacattttwaaaataaaagatgttatgggggagggggagggttggtccttggccatttatcaaatcagttctttttctaaaagcccaggaaagaatgtgaattagttgggtttttgttttgtttttagtttttctctacagaggtaaatttagagcttgaagaattcagaacaaggtcagcaaacattctagaaagggccagatagtaaacattttaggttttgccagtgaaagcaactatagacaatatgtaaacaaattagcatgactttattacaaaaaaattgtattttaaggcaacagtttcctcatctgtacaatgggggtaagagtggctctacatagttattgtgagaccaacatgagaaaacataccctcctgtccaatgctgtcaggcaccctgcatcactccataatcattaactcccttcaatatgcctcagggcctacctgctctgttccaataacaattttcaagaatagggctggaactcattcacactgaaaggtagaccagagtactgaagtttctgtgatcctcctcaggaatctgcactttagcttacctgcagaccaaggattggattagaggtttttttttgttttttccccccaagtttggtggtagggaggaagacttcattcccagtgtctgaaagcagactgcacaagtaactttgtctagtgtctggactcttggtaagcccttctcaaatgcctttaaccttgaggagctcscactctgatagaagtgctgctggtggcagtgcctgataacagagagctgagcaagccagttgacctcagacagtgatgtttrttgctgttgattgagccctggtgcctggttgactccccatttggatcagagtgaaggaagcaacacttctctagacctgcttctttcatctgaaggttgaaagtcatccccaagatgtctcatggcccagatgtcagggttcctcaaggtcagcctgactcagacaaagtgagaacttcagggaaaccagggaagttctcttcctctccaaatcttccctcacctgcttgttgttggctgccttatccctggccagtgccttctactctggtggtggtggtcttgttgtttttgagacaaggtcttgctctgtcacctaggctggagcacagtgacgcagtcatggctcactgcagccttgatctcctggcctcaagtgatccttccgcctcagcctcttgattagctgggactataggcacatgccaccatgtccagctaatttttattttttattttttgtagaaacagggtctccctgtgttgcccaggctcttccactctgctttggagcagagacacctgacagtgaaggaccaaatggcttccatatacatcaggggtgaagtgactgacagtggcccttgcctgggagaggctgaatatacaaacagacaatggctagaccatgtagaaaaacagaactctgacgcacaatagcagcaaccagcacaggaagccagcctactatccacaagtcagacttgtaggaagtcagaccactatctttaccaaccagtccagcaagccaaataatgaccactgtaacaattggcctccaaagccaggacttgattaataactgatagctgccctaatttttgcccctgcttccaacttaggaccaaccggagaaagccaaatatgtactcctaaccaatcacataggatgtcccactcttttttgagacagagtttcactcttgttccccaggctggagtgcagtggtgcaatttcggctcactgcagcctccacctcccaggttcaagcagttctcctgccatagcctccacctcccagcttcaagcrattctcctgctgcagcctcccgagtagctaggattacaggtgtgtgccaccaggcctggctaattttttgtatttttagtagagacagggttttgccatgttggccaggctggtcttgaactcctggtctcagaagatctgcccgcctcagcctcccaaagtgttgggattacaggtgtgagccaccgtgcccagccaggtgtcatgcttctagttagcccaccaacagcttccccatgccaacagcctgcaatgggagcatccctgaagcctttttttccactacagagcattcccattcctttgcctgcctctaagtctctgccaaaagcaagtgatggtggttgacttcctgctacaacaagctctgattggctgggcgcagtggctcatgcctgtaatctcaacactttgggaggccaaggtgggtggatcagttgaggtcaggagtttgagaccagcctgggcaacacagtgaaaccccatctctacaaaaaatacaaaaatttgttgggtgtagcggcgcacgcctgtagtcccagctacttaggaggctgaggcatgagcatggcttgaacctgggaggcagaggttgcagtgagcccagatagcgccactgcacttcagcctcggtgacccagcgaaactctgtctctcaaaaaaaaaaaaaaaattagctgggtatggtcatgcacccctgtagtccccccccactcaggaggctgagtcacaggaatcgcttgaacctgagaggtggaggttgcagtgagccgagattacaccactgtactccagcctgggtgacagagcaagactccatctcaaacaaacaaaaaaaagaacaagcgctgaataaatagcctttgtttgttctcaaaaaagaaaacaacaacagaataaacagtaaacaggctgcaggctagatttactgctccctgatctagaataatggttttggactgatgacaagatcccaggcatagatggagcaagatagaagcaaggagtattaattttatttaacaaacacatatagagccctcactatgtgccagatattattctaaacactttacaactacggattcatttcattatcattaaaatcctgtaagcgatgagcaccatgatgatccccagtttgcaaataagcacactgctcagagaagtgaagggtcacacggctggtgagtggtggagccaggatttgaatgcaaggaatctgtcaatgtctctgctgtttgtgctgttagagaaaagctccacctgcacagggagaagcctgatgacagggcctggtggtctctgtatccctgggcctggaccttagcagacctcagttagtagtcactgagatgaaatggaatggaagatgagtagtagagtgcctgtcaggcgttgtgatgatgacagggcctgtggacccactgtgtccttgtgcccactgcaggggacccgaagctgccagtactgtaccaagtggagcggacacgaacagggtcgagcttctcggtgcgctctgtgaaggccgtgcaacatgggaagcccatcttcatctgccaggcctccttccagcaggcccagcccagccccatgcagcaccagttctccatgcccactgtgccaccaccagaagagctgcttgactgtgagaccctcattgaccagtatttaaggtgagagacctggaggctccatggcagacttttcaaaatgcagctgctatctgtttgtgggtcatagaatcctttagtgggtcttgaccagcatttttaaaatacagattagaaaagaagatactggagtgaataatatgtatgtattaagggcaagaatccttttgtgaaacttgaggtttagtcatgtgtgtttctggtgtgtgtctgtactgggtcatggtataaaatgaagggcttggccgggtgcagtggcgcatacctataatcccagcactttgggaagccaaggcaggaggattgcttgagaccaggagttggatactagcctygccaacatagcaagactccatctctaatttaaaaataaggctggggctgggtgtgggggstcatacctataataacactttgggaagcccaagtgggaggatcacctgagcccaggagttcaagaccagcctgggcaacatggtgaaaccctgtctctataaaaaatacaaaaattagccgggygtcggggcatgtgtctgtagtcccagctacttgggaggctgaggcggggggatcacttgagcctgggaggtggaggctgcagtgagccgagatcgtgttactgtgctccagcctgggcaacaagagcaagactctgtctgaaaaaagaaaaaaagaatatatattttgttgttgtttatatatatacatgtttgtttgtttttgagatggagtcttgctcttgttgcccaggctggagtgcagtgacaccatctcggctcactgcagcctctgactcccagactcaagtgatcctcccgcctcagcctcccaagtagctgggattacaggcacctgctaccatgcccagctaattttgtatttttagtagagatggcgtttcaccatgctatccaggctggtctcaaactcttgatctcaggtgatccacccaccttgacctcctaaagtgctgggattataggcatgagccaccatacctgggaaaaaaaaccatatatatattttatatatatatgtatatagaaatacttccgtaaccacttgttaagtaccacctccccagccccctaagtgattccctctctcccccaggcccctggtccagcaacttaggacttaatgcacaccaggagtgagtgtcctctggagagctgcagcgctatggcctatgtttggtcactgcctttgcattagtgcatgtttttgtttgtttgtttgttttgagacagagtctcgccctgttgcctaggctggagtgcagtggcatgatctcggctcactgcaacctctgcctcccaggttcaagcaattcccgtgcctcagcctcccaagcagctgtgattacaggcacatgccaccatgcctggctaatttttgtatttttttagtagagaccaggtttcgctatgttgaccaggctggtcttgaactcctgacctcaagtgatcgacctgccttggtctcycaaagtgctgggattacaggcgtgagccaccgtgcccggccacatgttttatgtatataaaacatatgtacaaaaatacaaatatgtattttcccctaaccattagaccaccagggagcatgttagatattttgaatacctggtaaaatatatttatttggatcacacctaatcaagtttgaaaaatgctggyacaggggaaagagctctgggtccagacaaaggatagacacatggattctrtccagggctgtgcctctgtgaatgctcacctgctgtgggacagtgcccaactccccagggccctagtttcttcttctaaaaaatgggaatgctcatttctgccctgcctacttcttagctgtatcataaggagagaatgtctctatctcgtgttagatactggggaggcagcagagtatgacgggatggatgtgggtttgggaacctgaaaggcctggattcaattctagattttgtccctactagctgtgtgagtttgggcaagttgctttcccactctgagccagtactcaccattataaaatggtgctaatcatattcctacctcataaggctgctgtgaggattaaataagagagaaaaggcacttagcgtgctagtactaactarcacaatggcagtgaattgtrgttatatcactattaacagaaaaaacacagggcctggtgtgtggttgcagttcgacaaatgtttgctgaaatgaaaggaagacattgttaaaggaccttgaatttagatctgtgctgttaataaggtagtctctagccactcrtggctatattacattaattaaaattaaataggtccgggcgcagtggttcatgcctgtaatcccagtactttgggaggccaaggcgggtggctcacccaaggtcaggagtttgagaccagcctggccaacatggtgaaacctcatctctattaaaaatacacacacaaaaaaattagccaggcgtggtggcccgtgcctgtaatcccagctactcaggaggctgaggcaggagagtcgcttggacccagggggcagaggttgcagtaagcaagattgagtcactgcactcctgactgggcaacagagcgagattccgtcttaaaaaaaaaaaaamaaaaaaaaaccaaagtcagtagaatgaacaattctgttcctcagttgcattagccacatttcaggtgctccatagtcacatgtggctagtggctaccatagtgtgctgtgcagataggcattccatcatcataggaggttctgtccaacagcactccagaggataggggtgaaaatggcaggacctgtgcagagcactatgggtggttgtcactgtattgaagggagttccttggaatgggctcctccccctggggggatgcaatgttccctactgtgtagggtttggtaactcaggccaagtcaggcagcctgtttcttgagtgtttaaaataatgaagtggctgggcacagcagctcactcctgtaatcccagcactttgggaggctgaagtaggaggatcacttaaggccaggattttgagaccagcctgggcaacataaagagaccccatctctacaaaaaaaagtaaaaataatcccagcattttgggaggctgaggcgggcggatcatgaggtcaggaattcgagaccaccctggccaacacagtgaaaccccatctctactaaacatacaaaaattagctgggcatggtggcaggcgcctgtaatcccagctactcgggaggctgaggcaggagaatcacttgaacctgggaggcggaggttgcagtcagctgagattgcaccaccgcactcaagcctgggtgacagagctagactccgtctcaaaataaagaaataataaaaatgttagccaggcacagtggcgtacacctctagtcccagctactcgggaggccaaggcaagaggatggcttgagcctgggagttggagactgcagtgagctgattgcgccactgtactccagcctgggtgagaagacgaccttgtctctaaaaaaatagaaaataatcatactgtggacccagattgcctgagtccaaatcctgtctctccaatttttaagcaagctacctggactctgtgcttatttcactgatgaaatgggggtgataatagtacctatctcacagggttgttgtgaggaatactattgtatgtacaatgcttagaacagtgcatattacagggtatgccttattactatgatgtgttggttagatattcatgatcttgtcttcacagtgttggttatgaggtaggttactatcattatccacattttgcagatgggaaaatagactcagattactaattagcacgagaccacatggctcgtaagtggccaagaagggattcaaacgctgcactatcctgcctgccacaggggaggggagctttggggatatcaggggtccctgtggaagaatgaggggagtcagaagaggcaatgcagatgtgactccctctcttcctgggtctcaccccgaccctcttscctttactttcagggaccctaacctccaaaagaggtacccattggcgctcaaccgaattgctgctcaggaggtccccawtgagatcaagccagtaaacccatcccccctgagccagctgcagagaatggagcccaaacagatgttctgggtgcgagcccggggctatattggtaagagtaccccatggatgggaggaaaccactctccaaggggtctaccactcatttgctgtgtggccttgggcacatgagttcccttctctgggcctgtttccttatctgcatgatggggaagttggcttagcttctcacctgggccctctcagccctttgcatggggagaaggtggagatgactataatcccgacacaaggcctttctgaggaaggcaaaaggcacctcgctggggttgttgtccagctttgctgctaactataaagtatctttgtgcaaattggaagaagacacccyttttggggcctagagtgggagacttgggtggtgaagactgaatttcagtccctgctcacccctgccctccccaagtcgccatctcacttctcccctatmacacacacacactgtaggccaagygctcttgtgcagcaaccagtctgcacacccatgcacgggagtcccttttccccctacctccgtgcaggtcctgagctggaaagcccaggagcccagggctgatggggacctgttgcaggcgagggcgacatgaagatgcactgctgcgtggccgcctatatctccgactatgccttcttgggcactgcactgctgcctcaccagtggcagcacaaggtgcacttcatggtctcactggaccattccatgtggttccacgcccccttccgagctgaccactggatgctctatgaatgcgagagcccctgggccggtragtgtggggcygtgtgggacaagggcactgaccttgagtggcaggagcctgctttcttgggtgatgctgatttcccgacttcctgtgtggcgctgcacaggtcacttcctttccttccctcccaggctttggcatcttcatcttcaaaatgagagggtgaggccgggacacctgctctgctctaaatttctagaatgtgctggaaatgtgattcaccttctcccagggacccagttctagtcccaaaaccagttcagattctttgtattacaataggcaaatcatatcttccatctgaacctcagtttcctcatctaaacaaagagggttacattacagcagtggtatccaaacccgcagtccatcagactgccatttggggatgccttttcaaaatagattctgattccaccctcaagattctcactcagtaggtcttggataaggtccaggaaactgtatttttaagttctctaagtgattctgattaacctgattgggatcggggcattcagtggtccctaagggcctgcttggaccttccttgcaggggagagaaacaagactcgttcatcaatgtctagcttcagaaccctgacctcctttccaagggagtacatttcaaatgaagaaaagctttgcttgataaaccaaggacaaaactcaaggattctttatactcagataaggggtattctcaagtaccaatagcatcacaatccaagattgataaccttgaagtgaggacatgggttcagatttggcttcatcatggggccaaattcctgaccctctctggatttcagtcctggtctggaaaacwggacaacacataactgcttcatttggctactgtgagaactgagtgagctctgctatgtgtaagrgaaaccagcaatcatcctcataaacatcaaacttgggcccaaagccagcragggagaaagagtctccagatggggagggaagaggccagacctcatggcctcaagtcctctcttctgagtccyttcttccccttggtggtggtagtggggatatttttcatgaattaccacttggaggacctggcttgatttattatacagggagccgatagttttcctaacacaagtggtcagaggtacagcagttctgcttggccgarctgttgaaggagactgttctcagagctcctccctctgtgatctttttgaggaagcgaggagaggtgtgaaagtgcttttaaactgtcaactggggttcctgtgggaggagttacccctcaatgacggtccataataagctcatgaaggggcatttggagcagccacgacactcagtgcacccttgtgtggggcagccctgccctgggccagaccctttgcaagaagtccacttggaggttgggcatggtgatgtgcgcctgtaatcccagctgctcaggaggctgaggcgggaggatcccttgaacccaggcgcttgagaccagcctggcaacttagtgrgactctgtttcaggaaaaaaaaaaaaagtgtatttggctgttctgaagcaggccatcatcacccttcacctcacccacaggtggctctcgggggctggtccatgggcggctgtggcgtcaggatggagtcctagctgtgacctgtgcccaggagggcgtgatccgagtgaagccccaggtytcagagagcaagctgtagccagaggtaccagcttcgcctggggcttcaagaacctcccatctatccccattcctgagacaggagttacagtcccttttggccctcacatccaataaagagactgataccactggagtggctggcttttaattcccctgggccagacctgcagccttgccttcatcccttaactccaggactccaggggcagagtccctggccttcagccaagaggccttgccagcttgggggcccaccaacaagggaacattgccccaacctgtgccacagccccccggctgtttataggctggagaggctgtgtcagacttccctgtactacacaagggcaaccccagccaaagctcaccctgagcctagctcaacagaagtttccttgatctgcttcacattctcttttggaacttctaggggctcccagcaccctctgcagcctcccagctattctgttctcatcaggtccttcccctgccttctggggcaacccctctcctcacagtggccttaaatctaggcaagggttagtccagcacctccttgatgagcaattctttgagactggggggtggtgtgggggtaaggcctgcctcctgcagggcttggagccgagcctctgattgacgtttgtccaggcccaggcgccaggagagccggacatgggcctccaraaagggtgccagcaaagggtggaggctcttgtccccaagcagctgcagggccttctcacagcatgcccgggcctctccagggtcttccagctcctggtggcacacggccagcccagccagggtcagcagggggcggtctgggccagagggggtgcccagctgggcttgcagctgccaggcattggcccagagtgccagagcctcacgatagaggccagtacaggtgaggctctgtgcccgccgcagctccggcagcacgaagaagtcctgcaggtccggggcatggcgcagctcaggcactgcctgcaggtgacccaaaaactgctcaaaggcccggctacggcgggcaatggtctctgcagtaaaattccggcgcagccgcttacgggggaaggagatggcagccattgggccccggaattgccgctgcaggtttcggtgcagccgctcaaagtccgagtaacggcgagagatctgggctggctggcaatctggcggtcctgggccgatcacggcgagggtgtagagctgcagggagggtgggtgtcagggcaaatgcaagttgtccacgggcccgttccctccccatccttccccatcccccacactcccagctgtacctccccacctcttcctttcacccctgggacagcacccaggagggcgggagctgctgcgcagtggcggggaagcccagtcccatcttacctgaggtttgtctgaaatgacccaggcccaaggcagcaagaagagagaaagacagagatgagcttcagtgcccggggctgctgcccctttttttgtactcccttcccatagagcagttagttcttctgacagccccctctggaaaaccagacataagctgaaaccccggccaatctcttggggctcctttaggaccagcttggagcttgttccactttggacacctggcctccacatccctggtcaggcttttccaaactagacccagaggacaggtctgtagatagccacaactgccataactgtgaaaagtatactggcctaggactcaagttctaaccccaggtcagctactccttctctgtgtgacccaggcaagggagtccccctctgggtccacttctgtttctagtgaaggaagtgctcggtcaagtcagtgtttgtccaaaaatgagacatgtacaagtattggtacctgaggtttttaggtggtgtgcactagagtaaatatcactgtatcagaaggtggtccccttttatatattatttttagagacagggtctcactgttggccaggttggagtacactggtacaatcatagcttactgcagcttcaacctcctgggctgaagcattcctcctgcctcagcctcccaagtagctaggactataggcatgcaccaccacactcagctatttaaaaaaatttttttttttttttttgtatggagatgagggggggtctcactatgttgctagggctggccttgaactcctggccttgaacaatcttcctagctaggcttcccaaagtgctaagattacaggcatgagcaccacacccagcctaattgttttttaatctttctgactacaaattgagaagctctcagtttggttttgttggggtttttttatttttttattttttttgagacggagtctcgctctgttgcccaggctggagtgctggagtacagtggcacgatctcggctcactgcaagctccgcctcctgggttcactccattctcctgcctcagcctcccgagtagctgggactacaggcgcctgccactacgcccggctaattttttgtattttttagtagagacagggtttcactgtgttagccaggatggtctcgatctcctgaccttgtgatccgcccgcctttgcctcccagagtgctgggattataggtgtgagccaccgcgcctggccagctctcagtttggttttaaaaaaaggacttcttgggcaggttgcagtggctcacacacacacctgtaatctcagcactttgggaggctgaggcaggtggatcacctgaggttgagagttcgagaccaggctgaccaacatggagaaaccctgtctctactaaaaatgcaaaattagccaggcgtggtggcacatgcctgtaatcccagctacttgggaggctgaggcaggagaattgcttgaacctgggaggtggaggttgtggtgagccgagattgctcatggcactcgagcctgggcaccaagagtgaaactctctctcaaaaaaaaaaaaaaaaagtacttctctaacacttctcatctccatttttagaaaagagtcagaaagtggatctcaggtcagggcctccttcaggcaacaacatctaggcaagatttaatgacgtttcattttcactacttacttatttactttatttatttatttagtctcgccctgtcgcccaggctggcatgcagtggcacaatctccgctcactgcaacctctgcctcctgggttcaagcaattctcctgcctcaatctcccgagtagctgggattacaggcgcctaccaccacatccggctaatttttgtatttttagtagtgtcggggtttcaccgtgttggccaggctggtcttgaactcctgacctcaggtgatctgcccacctcagcctcccaaagtgcggggattacaggtgtgagccaccgtgcctcaccttttatttttatggctagcttctctcggtggcaagtgagactttccacgtacggtagtgctatgaagttgtcttttaaaattacttaaaggatgggcacagtggctcatacctgtaatcccagtactttgggaggctgaggcaggagaacagcttaaggccaggagttcgagaccagcctgggcaacatggcaagaccctgtctctaaaaaaaagaaaaagaaaaagaaaaagaattagttgggcacttgtggtcccagctactcaggaggctgaggcagagaatcatgtgagcccacgagttcaaggctgcagtgagctatgatcacgccactgcactccagcctaggcgacagagcaagactccgtctcgataaacttatttaagaaaaaaaataggttcggctgggcgtagtggctcacacctgtaatcccaacactttgggaggctgaggcggcagatcacttgaggtcaggagttcaagaccagcctggccaacagtgaaaccccatctctactgaaaatgcaaaagttagccaggcatggtggtgggcacctgtaatcctagctactcaggaggctgaggcgggaggattgcttgaacctaggaggtggaggttgcagtgagctgagattgcaccactgcactccagcctgggcaacagagcaagactctgtctcaaaaaagaaaaaaaaaaagataaagaaaaaaaaataggttcatttaaagaaaaatgttaagaagaaaaggacacaagtggcatttttagataggacaagaatcagggaggtattggaatgactgaggtttggaaaacactgaacaagatgatcacgaagctccccgcctcccaggtctgagaacctgaatatggattaacctataatgccaagccaacaggtttaaaaggagagttaaccagtgttagatgttaaaggcaccctaacaccaaatccagatctttctctcacatttgttctgtggaactgacaatactctagccactcctggtcagttaggtttgcttactctgtcctcttgaagattcacagtgtatatcactattagggattaaatactttaacaataaagaaacttattgtattctcatttaactctgcattctcaaaacatattgcctgcaaaacctttatttagaaacagctattaacattccagggaactagttttctgcaggacacactttaggacaccagttttcttcaggacacactggtctatataataagcctttatgttcatctagtttacattttgtatccattatctcattgaccttgtaacatgcagccagatgggtgataatgacagtagttccattacccaagcatttaccctgtgcctcctgttgtaccaagcactctttacatctgtgatttcatttaatcatcacaacagcactgcaaggaaggtccttatctctgacagctgaggaagcaggctcaaagagggggaaaagggctcaaagacttgccgtaagtcacacagctggaaaacagcccagctgggatttaaactcaggttgatctgattccaaagcctgtgctcttcacccccacaagttgagtggggaattagggtccccattgtacacaggaggtgccttgcttctccagacacaggccggggcatacttggccatcctgctctatcttgtcatcccttcccatccaggtacccacagtcacccccattcctctcagcctctgaactattccttggtgtccccttccagtgtatgaacccagagttctgagacctttgccacttcagacttcatcattggccacacgtggtggtgcacagctgtagtcctagctacttgggaggctgaggtgggaggatagcttgagcccagttggaggttgtagtgagttatgactgcaccactgcactccagcctgagtgacagaacgagaccctgtctcaaaatttttttttttttttttttttttttttgagacggagtctcgctctgttgcccaggccggactgcagtggctcgatctcggctcactgcaaactctgcctcctgggttcacgccattctcctgcctcagcctcccaagtaactgggactacaggcgcctgccaccatgcccggctatttttttgtatttttagtagagacggggtttcaccgtgttatccaggatggtctcgtgacctcgtgatccgcccgcctcggcttcccaaagtgctgggattacaggcgtgagccaccacgcccggcctcaaaaatttttttaaaagactcaataatcggagtcggtccctgctgaaattggagtagtcaccccatgggtgtggcccttgcttactaacagcaacagaaaagggtggagaggcccagatgtgggactgggctccaggccccctcctgctgagtcagaggtggagaagggtggtgaagaggaggggagtgagagatggagagctgccactgacaggagtggccagctcagctggctttcaggcctggcctgaaaagggactggagcaggagtcgctgtgggcattaaaggagcagacctcattctccaagtcagtctctcaacagcaaggaaaacagcaagggactccaaggtcctccccaacattgctcttcatcctaacctccaccaaccctctaagtctagcccttagggacaaggtcgggtgcttgagaactgattgacctgtgcgttataaggacacagcaggccctagatgacaaacattttcaacccaaagttaaataatgatgacatagctaccatttcattgaccacgtcataatgccaggcacactgctaagggctttttgtccattgtctcatttaactcctgctgtaatcttctgcattttccccattgctataatgaggaaacggaagatgaccaaggttaaacaactcacccagagtcaaacaactggaaataagtgggagtcaagattggtctggatcgaaagcctatttccttaactaccagcccatgcaacttggatctcaagtttgacccagataacatctgtctctctgtatctcacatcttgctacaatttgcaaaaaccttgtgggctgggtggggaagtgcacacaccagttctcttagtctcaaaaccaggttaagaggaaggtccttaatccccacttcagtcagtctcaaggaaactaagtcttgtgtgaggatttgctcaagttacatcccctttctgacctcagtttccccatttgtaaacaaggtaaccatttataactacatagacccctcaggaagttggggtcttccctacttgctcctagccatacttctggactcacagcccaggggttctagaccctcactcaccacgtacttggagggcgggtccttgacaacgttagcgctggtcacttcgaagagcagccgctggggtgccaaggtgttccgggacttcttccagaaatcctgcagctgccgcgccaggagctgactgccccactgcccatcaggtggggggctccgttctgcagacacatgaccagtcatatcaatgggcctagggccagg

SEQ ID NO: 95762 - DNA, 16334 bp, Homo sapiens
actgcacagccctgtgggatcccagaatcacgggctttctctaccacattctgtgcaagttttcaagttctttgaaaggcatacctgctcacgcttcttctccagtctgatatcctcgagtcccaacacttaaacagtttgcccagtggctcctttgttttcctctcttaatgtcgtcactcttgctattcccattgcctgggtggcctttctctcccacccttatctgcctgactattctttaagatccacctcctccaagagctttgtttgtatcatccccaaaatcaatatgcttttggacctactttgaattcccacttcagcgtggtttaaagtatggcttcaggcctggttccattattttactagctgcatgaacttgaacaaatggctccacatttgtttttcttttttctttttttttaactagctcaagtctgggaattgatccacatttctgagtctgtttttgtcctgtataaaatgagaatagtgatagaccaaccatttttttttttctgagacggagtcttgctctgtcacccaggctggagtgcagtggcgcgatctcagctcaccgcatcctccacctcctgggttcaagcaattgtctgcctcagcctcccgagtagctgggattacaggtgcccaccaccatgcccggctaatttttgtatttttagtagagatggggtttcaccatcttggccaggctgctctcaaactcctgagctcagatgatccacagcctcagcctcccaaagtgctggaattatagacttgagccactgcacctggcccaactttacaaattctctattagtgattataagtatcttttcagtcatttagaatctatttgtatttcttctgtaagctgcctgttatatcttttgcccatttttctctccttcagaaggcattattcaaattcttttccttttttaaatgttttgattatagaaataatatataaacccattcccgtggtaaaaagattcagacgatacacaggaggtagtagagagcaaaacacagtttctcagccaggtgcagtgactcacgcctgtaatcccagcactttgggagcccgaggcaggcgggtcacctgaggtcaggagttcaaggccagcctggccaacatggtgaaaccccatctctactaaaagtacaaaaattagccgggcatggtggtgcactcctgtagtcctagctactctactcgggaggctgaggcaggagaattgcctaaacccaggaggcagaggtttcagtgagccgagatcacgccactgcactccaacctgggcgacagagcaatactctgtctcaaaaaatatatatatcagtttctcttcactcctcgattttttttttaaggtgcttaaattctggtttctaggtgcccaacctagaatagaaaccagaatttaagccttatttgggttgagcacagtagctcatacctgtaatcccaacactttgggagactgagtgggtggatcagttgaggccaggagttcaaaaccagcctggccaacatggcaaaaccccatctctactaaaaatacaaaaatcagctgggtgtgttggcacgtgcctgtaatcccagctattcaaggctgaagcagaagaatagcttgaacccaggaggtggaggttgcggtgagccaagatcatgccactgcactctagtctgaacaacagagcgagacgtcatctcaataaataaataaacagccaggcacggtggctcacacctgtaatcccagcactttgggagcccgaggtgggcagatcacctgaggtcgggagttcaagaccagcctgaccaacatggagaaatcccatctctactaaaaatacaaaattagccgggcgtggtggcgcatgcctgtagtgccagctacttgggaggctgaggcaggagaatcgcttgaacccaggaggcggaggttgtgatgaagcaagatcatgccattgcactccagcctgggcaacaagagtgaaactccgtctcaatcgatcaatcaatcaatcaatcaataaaccaaccaaccttatttgtaactccaaaaccgaattcttaaccatgatgctattatgcgtccgacagtacatgaggtgtcccgatttttgttttattatggtcaccataataattacagacgttataagccacctccgatcattttttaaaaagaggaagctctaaaataatagttatcagtcccaccagttgcccggggtgctttgttgtgagaagggggtggggattgggagtatactaagtctctgggaattgggtcccatggtctgccctcggggttggcttagctttctctgaagagattagtgagccctctaagtccaccacgcttggagacaaggacttttggtaagaactgctcaagggccaagagtatgctctgggaccaaatgagaaaagccccttacccgaggctaattttcttacaacttcattccttacagtatgcagctgacccccaggataagcactggctggctgagcagcatcacatgcgggcaacagggggcaagatggtaagcattattcatttgtgccactgccagtgacccaccccacctgggaaccaggattttggctgtgggtgacagcctacctccaaatctgacttccaaagcctcaccaatgtgtgagaagagagacttataaggcctatttcttcatgctgaagagcaaattgtaatcttcaggttcccttccctatccctaggtctcccttccgccccctcacacttttacctcatgcctccaagatcacatatttggatactattagctgtccataggaatagcaggtataagacacacagtactactttttcccactactgcacccactgacagatttcactcattgatcactcttccaccagacacagctatagaatcttttctcaacacagtacttgaggcagcaacccttgtcagtaggagttagcaatgaaatgtgtttgcacacttggcagccccttccagatttacctctacttaaagagttctcagatcatatgaaacagcaaccttaggaaaatcatcattgcatgtgttcaaaaactattgttgagggctttgtccatcacacacaatgtcccccacctgaggactcactcactcccaccacaggtactgctccttttagaatctaagtgccttacaaactgatatgccatctcctttctggcagtgagagctaccttttattttattttactactctatttatgcctatgctttacttcaaaaaagatttcaggtaagcttcatgcacataaaatgcaacattacataaataagaaatagatggtagggggtgggggcaggacctaaaattaagccaccagtaaaagtagttctttaaaaaaaaaaagtgttttttatattgctgacctgggagacctgtgcacttctacagatgttggcaaattcagctgtaggccccactcatggacacctgatctgttatggttcatagtgcccataagatgtagacaaattactcaaggaatacacaattattcctgaccctaacattagaaagtctcccacagaagactttctaatatgatgaatatctcttcctatatgttaagttcacaaaagggccctcacccactgtagaccgaggcattgtgacaaagcatttctacaggccccagtacaatacatgccaattactagacagcagagcagtttatcatgttttccattttgccacaaagttcaaaaccaagttatctttgtcctcagagggagcacatggtttcctcttcctgatttcctgtttccatatatattttgctggctttcttgccattttgttataacccaccttgggtcctttcgtatacttgatcttaaccaaaaggtgtaggagcaatggtggatccctttttttttctttttttcttttttttttttttcttaattttcaccacaccattcaagagagaaatgggtccttttttaaaagagaaggctataaataagtcaccagtccctactctcccatccatgaagcatctactgtagtaaaagattgtctcaaggaaccattcccatccctccccacttactcttccgtactaaattgtaaaccgcatcccccgcttccacctagtagcaggccttacattaaacagatgtttaatgaagtgttactgagttggagtgaaatgaatcaggcaatgaccactctcccttgctcctgcctcaggcctacctcctcatcgaggaggacatccgggaccttgcggccagtgatgattacaggtaaaaccagtgggtctcctgccccttctcctctccctgcctccaaatagcccctagaatgaggcagggcctacatcctcacttcccccaacttctctcttcaatgtctgttccagaggatgcctggatctgaagctagaggaattgaaatcctttgtcctaccctcctggatggtggagaagatgagaaagtatatggagacactacggacagagaatgagcatcgtgctgttgaagcacctccacagacctgaggccgggtcccctggccacacttggcagccctcctccaaagccctcttcctcacgtggctgaggccaccgctgggactgctcctagatggatctcagcggcattaagctgtgcctgagcgagtttgtagtgactcactgcacagcacccccagactagcatgtggttctatatttgtaaagttattgggataagaaacaattaaacagtttgtagtaaacacagatggtgaacctgctgtgccctctaccttgtgggaattgacagaacatcaagggctctagaagtgggtgtaggaaaaaaggacgagataaccctcacccataacagtatagagccaggcttgataagaccaacctgggagcaccatgtaccctgcccgtcttccctttgcccatttgtagtttccttacccagctaatgtaaggacatggcagaatgcgatggagtttgatgacagatcatatgaaaaatagagttggcttttattgctcccattttacaggttaagatactgaaggacccgccccaaggttacacactacccactggggaggtaggatatacaggatatgaacctgtgttgttggggtttttgtttgtttgaagacagtcttgctctgttgcccaggctagagtgcagcctctggctcaagcgattctcccgcctcagcctcgccagtagctgggactacaggctcgtgccacctcaccagccttttttttttttcttttctttttttttttttttcttttaagtagagacaggtctccctatcctgttgctcaggctggtctcgaactcctgggttcaagtgatcctcctgcctgggccttccaaagtgttcgggattacagacgtgagccactgcgaccagcctgaaccaatgttgcctttttttatttctgtcatctctgcggagatgtatggacctatgttttctaatagggagcctgctgctctggccatcagcctttagtttttcccctcgctgggattttcagatacttaggacgcagcaaaggtgcccaggcgattataatggtgggagggtaccagtgctgcaggattggaggcactccctgcccgagggaaattggatcaaggctgggcgtgccgagtgttcccacgcggagtaagacgtgtagccagaaggaggggttcatcccacgtggacgttttcttggccctttaatggttagcgttttccaacggccaccaattcgctacggattcgttagttaatggcagcatcrtctaccaatcggttgtcagaagcgggattctgccgcccaatagcggtgcgccagtgggtaggtctagcagtggcgcagcaatagagcgctccggagcgtctcattggctggatcaaacccaagcgagccattgattggtcgacgcccccagagggttacaattcaaacgcgggcgggcgggcccgcagtcctgcagttgcagtcgtgttctccgagttcctgtctctctgccaacgccgcccggatggcttcccaaaaccgcgacccagccgccactagcgtcgccgccgcccgtaaaggagctgagccgagsgggggcgccgcccggggtccggtgggcaaaaggtgagtgatgcggcctaccactcgccgggcctgccatgccctaggcattggtacccasagcaaagatttctaggrccaccccccgccgccacctcctggagcgggagatctgcgggtgcaggagaacacaccaggagctcggggcctggcattcccctgggcatgggtgtcgagggcggagacttccgggactcccacctccttgcgcgggtgagattcgagagatgggggacaggccaggagctcagaccgctctttgagactctcccgaaggagaatgggagggtaggggcgctgccagactccttccctggtgggcctagatgaagacgctcaaggaccctcgtgacttggccgagacaggggaagggagaagttgagtcgggcaaggaagagatgctaaagcctggggaattaagaacatgccagaatcatcccgagggagtctggaattagggagggtgaggactcgctaggatcgtcctgtggatctggtgagtataccctgagctgagcctgaccttggtgatgtggggagcctccatgacggctccccctgagattcaggtgggagaagatgcaccgtctggaggcctggcccatccagactcccaggtaaccccgaatactcttttttcaggctacagcaggagctgatgaccctcatggtgagtgattaagtgcccagaaccccagccttccatccaattttcagtagcctccttttttccgtcagcttttttgctagacataggggtaatgtaatttgctccctcctgggaaagaagttcatacaccccacctacaccatttcttccagcagtccctcctcccaattccatccccccacacgaagttatctcgaacacttccctgaagtcatacaagacyctccctatccagtgtgtccctacttcctagccccaaccaagctttacccacacccaactccccgcccttcttggtatttctagcctatgaatttggttgctttattttggatcagagtgatgagattaaggggaggctgggcgcggtagctcacaccttataatcccaacactttggggggctaaggtgggcggatcacttgaggtcaggagttcgagaccagcctggccaacattgcaaaaccctgtctctactaaaaatacaaaaattatccaggcatggtggtgcatgcctgtaatttcagctactcgggaggctgaggcacaagaatcatttgaaccgtggagacagaggttgcggtgagccgagcgcaccactgcactctagcctgggcgacagagtgtgtgtgtgtgtctgtctctgtctatctctctctctcaatctctctctctctctctmtmtcyatatatatatawgtaaatatatattttttagtagagatggcataaccccatctatatctcatatatatacacatatatatgtgtgtgtgtatacatatatatgtgtgtgtgtgkatgtgrgcatatatatatatatatatatataaaattaaggggaaagctcacccactgacctttgctatgcccaaaagtgtactccacattccaacaaatgtgttttctccccagatgtctggcgataaagggatttctgccttccctgaatcagacaaccttttcaaatgggtagggaccatccatggagcagctggaacagtaagtgtagggctgggatgggtgagtgagtctggggaaaggtgggaagtgagatccaagtgcgagctctgcttcaagcctttggcggagcaagacactcctcctgtgactgtttacattctctgagccatgtggccttgttctttccctctgtgcaataaagggtgggtttaaagcagggctgcctatcttagatgtttacatggggggacagacagcaaggaaatggatgaagtgaggactttggccaatagggccagatctcaagaaggcagcttcccattgctgcagatcaggtttaagatgagtcagaagtccaaatctgtgccaaatctaatttttacgtattagcaactaatattcttttttttttttttttgagacggagtctcgctctgtcgcccaggccagactgcggactgcagtggcgcaatctcggctcactgcaagctccgcttcccgggttcacgccattctcctgcctcagcctcccgagtagctgggactacaggcgcccgccaccacgcccggctaattttttgtatttttagtagagacggggtttcaccttgttagccaggatggtctcgatctcctgacctcaagatccacccgcctcggcctcccaaagtgctgggattacaggcgtgagccaccrcgcccggccagcaactaatattctaattgaactaaagcacaggatgccaatttacaatccttagaccaaagagtcactgatgtctccaccagataagaggaaagcatcaggctaggcatagtggctcacacctgtaatctcagcactttgggaggctgaggcaggcagatcacatgagcccaggagtttgagactggcctgggcaacatggtgaaaccctgtctctaaaataaaaactaaactaaaaaaactttttaaaaaggcagtggggagcatcagaaccagctcaacagtttgtctactgtccggtcccagagaaactcaagattctagcaagccccttgtgtggggcttgggttgggacatgaggctgctgctggagcttactctgcaactgtttctccaaatgccaggtatatgaagacctgaggtataagctctcgctagagttccccagtggctacccttacaatgcgcccacagtgaagttcctcacgccctgctatcaccccaacgtggacacccagggtaacatatgcctggacatcctgaaggaaaagtggtctgccctgtatgatgtcaggaccattctgctctccatccagagccttctaggaggtgactttagagaccacccctcccctccatgcaacttgggaacctgtcaggactccctggggtcagcctcttctaccgccttgaccttctctttctctccacccacagaacccaacattgatagtcccttgaacacacatgctgccgagctctggaaaaaccccacaggtgagtcctcagtccttgagcccagggtgatccctcccccaaccttcaaaggctccctcaaacaaaaggagcccagtgacttgggaccgggttggttggggcagggtggagtgtcggcagcaacccacttctgtttctgccccagtgctcctatttgctataaaatagcaattgttttatagcagaataaaaatgtttggcgataaayaattttgggaaattattggtgagaccaaggcaggaggatagcttgaggccaggaattcagtagagtgccttgcctgtgccctccagtctcactggaagcaagcccttccaggagagctgcctagatgggcagtgcagggagaatgccgggctgggaaaccagcccctcctccacctcctccgacctttgcatccctggtccagctgcctcttgcccaccttaattcatcctgggccaggcacagtggctcatgcctgtaatcctagcacttggggaggccgaggtgggtggatcacatgaggtcaggagtttgagaccagcctggccaacatggtgaaaccccgtctctactaaatacaaaaaaaattaaccgggtatggtggtaggcacctgtagtcccagctactcaggaggctgaggcaagagaatcacttgaatctaggaagcagaggttgcagtgagcagacatcatgctattgcactccagcttggtcaacagagtgagactccatctcaaaaataataaatagtaaagattaactcatcctgtctccatcactcactgagacctgcctgttctcttccagcttttaagaagtacctgcaagaaacctactcaaagcaggtcaccagccaggagccctgacccaggctgcccagcctgtccttgtgtcgtctttttaatttttccttagatggtctgtcctttttgtgatttctgtataggactctttatcttgagctgtggtatttttgttttgtttttgtcttttaaattaagcctcggttgagcccttgtatattaaataaatgcatttttgtccttttttagacaagttgttgcgttgtaatttcactagggttggaggtactcagggtaggcagaggtggaacttaaggatgtggggccaagcaatggggtgacaaagatttattcccttgtaccttattttatgactctgcatctgtttcttcatctataaaatgagtgtcacaataatgcctcctgtctatggagtcggtgatgtgtaccagcaatgttagtgaatgttggagctccctcagctgtgttgcagatgaggctgagccagaccttaggctgaaacctactcctatagctgtagaaggaacaagcgtgtgtgttgggggggggatcccaacacacagccacccatgttctgtcctgaagaagaatgcttaggtcaccctaagcaggtccagggcctggggagacagccaggaaaaaagccccttccctggcaggactcaggtctgagctctggtctccaggctctagcccaggtccccggtggagctccacctccaagggggcacagtcgcctcctgctgcatatcccccrgggagcccccagccccttgggctgcctctttcccctggcctgatgaaggctccagtctttgagcccctaggaggaaacacccctgctgaccagctgggtccccacaagggtcggcaggtggaagagtaggttgaagtgatagggcccccacaaagcccttcaggaagatctccaaggtagataagcagcatccagatgtgctccaaccttgcacccaactccttcaggtctgttagcagctggttggttgtgcaagcctgaagcgggaggggtttgggattggaagttgggtcccttcatgtctataattgtgctcttaggtctctcctcttgggttttttcttaatctaacattcatacaaatacacttgggatcttgttaaattcttttctgtaggtgtgaagtggagcctaagatccagtctgtttatttattttggtttctaaatagtttccaagtgatgtcattgctgcggtctgcttaagaacaaaatttagagcaatgttcttagaatgtggtccttccagcagcagcagcatcacccggaacttgttaggcaaattcttgaccccaaactgccctccaggttctgaaggtctcccacggttgaaaatcactaggttagcggatactggagaaaaccagagctcagaacctggcactaaattagtcaatatatgctggccagggccgggtgtggtggctcactccctgtaatcctagcactctgggaggcggaggcaggaggattgattgcttgaacttaagaattcaagaccagtctgggcaacacagtgagacccccatctcaaataataaattttaaaagaaaaataaataaatcttggccgggcctggtggttcacatcagcaatctcaacatcttgggaggccaaggtgggaggatcacttggggccagaaattcaaggttatagtaagcttatcactccagcctaggcagcagagtaagaccttatctctaaaagaaatgtttcgaatactaactgtggtggatgtgttttcatctgccatgtggtccttggtcacggtgtttggtaccttagatggccacatggcctgccttgggccagtcacaggtctaaactgtagttcagattcaactggtgttgtctggaattaatcactgggagagagtaaagttattttactaatggggttgctaaaagagaagggagtcagtctcagctgctgggggagcccgctgcagacggaagaaagccaagtagagacaaacagctgggagtcggagagatgacattaactgagactctggcctccagttcatgctttgccatcccagttcgataaactaacaaatccctttttggtttaagtccgtttgatttagatttctggcacttgcaacagaaagaagcctggtcaggaagtatttgaatttctggttattatgattcccattttattgaattcctacaagacaaaggccctctgcttggggctggggacaaaacagggaaaatacagctctgcccttaaagaggctggaatttgggggacagacaggcccatcaacagcggggactgcggaataagtgccatacagcccagttattaagctcagaccagtctgggcacggtggctcatgcctgtaatcccagcactttgggaggccaaagcgggtggatcacctgaggtcaggagtttgagaccagcctgaccaacatagtgaaaccccgtttctactaaaaatacaaaaaattggccaggcatggtggcgagtgcctgtaatcccagctactcgggaggctacggcaggagaatcgcttgaacctgggaggcggagattgcagtgagccgagatcgtccattgcactccagtctaggcaacaagagcaagactccatctcaaaaaaaaaaaaaagaaaaagaaaagctcagaccaggtaagcagaactgtttcaggatcctggctccacctccatgttgcccgtaaacatgtaggcagttacatttaacctctccgtaaaatgaaaatactggtacctacctcataagacagtggaaggaccttagaacaatgcctggcacatagtaagcactgaataaatgttggtgctgaactcacatattgctatgtaagttcacaggtggagcacccaatagaataggagggtcagggaaaggtttttggagaaggaaattgagccctgagggagatgcacattccttggatagcaagaagttcaggagtatgtaaggagaggaatacagagctaggcgtggtggctcacgcttataatcccagcactttgcaaggctaaggcgggcagatcacctgagctcaggaattcaagaccaccctgaccaacatgatgaaaccccatctctactaaaaatataaaaattagccgggcatggtggcaggcacctgtagtctcaactactcaggaggctgaggtaggagaatcgcttgaactcgggaggcgggggttgcagtgagccgagatcacgccactgctctccagcctggctgacaagcacaaaactctgtctcaaaaaaaaaaaataatacaggatggggaagtcgcatagatgtcaggtcatgataggctggaaggccatattaaggtacttgggctagccttggtaacaaagtgagactccatctctacaaaaaataaaataactaggggctgagaagggaggatcacttgcacctaggagttcgaggctgcagtgagctataattgtgccactgcacttcagcctgtgtgatagggagattcagtccttaaaaaaaaaaaaaaaaaaaacttggactttatcttgaggcaacagccagctaatgaagccttgagcagggcagtgacgtgatcagattttttttttttaaatttattttttgagacggagtttcactcttgttgcccaggctagagtgcaatgctacgatctctgctcactgcaacctctggctcccgcattcaagcgattctcctgcctcagcctcccaagtagctggaattacagacatgtgccaccacacctggctaattttgtatttttggtagagacggggtttctccatgttggtcaggctggtctcaaactcccgacctcaggtgatccacccgctttggcctcccaaagtgctaagtttacaggcatgagccaccacgcctggcttatgttattttttaagacagagtctcactctgtcacccaagctggagtgcagtggcgcaatcttggctcactgcaacttccacctcttgggttccagcgattctcctgcctcagcctcccaagtagctaagattacaggcatgtgtctggctaatttttacattcttagtacagaggaggtttttccatgttggccaggctggtctcaaactcctggcctcaagtgatccgcctgcctcggcttccaaagtgctgggattacaggcatgagccacagcacccagcctccatctctattttaaaatatgtatatatttcaaaaaaaaaaaaaaaagacatccaggtagaaccaataacaggtagatggcatcagaattaagagccttgttcccgtgcacaccacatagcacatggcgatactacctaggttattatctgggtgcctgtgtacttcacctccctaggccttagttttccaactgtaaaatggagataacaacatctgcctctagggatgttatgtgagtgaatgagacaatgtctgtaagacatagtatacagtaggcactcagtaaatagtaatgattaccaaaccccagcactgatcctggctggaaataaaaacagaaaaacatgaataggacaaaagaggaagagaaaaagacagatggagaggaagaactaaagcaatgagtaaggtgacaatagaggctgggcacgatggctcatgcctataatcccaacactttgggaggccaaggtgagaggattctttgagctcaagagtttgagaccagcctgggcaacatagtgagaccccatctctgctaaaaataacaaaaactagtggggaggggtcacccatttatagtcccagctactcgggaggctgagacaggaggatcgcttgagcccgggaggtcaaggctacagtgagctgtgatcacctactgcactccagcctgggcaacagagcgagaccctgtctcatttaaaaaacaaaacagaaggccagatgtggtggctcatgcctgtaatcccagcactttgggaggctgaggcaggcggatcacctgagatcaggagttcaagaccagcctggccaacatggcgaaacctggtctctactaaaaatacaaaaattagccaggcatggtggtggacaccggtaatcccagctactcaggaggctgaggcagaagaattgctcgaacccaggaggcggaggttgcagtgagctgagatcgcgccactgcactccagcctggatgacaagagcgaaactctgttaaaaaaaaaaatgcttgctatgtgccaggcactgctgtaagcactttgcacacactaacttcttctcacaaccccgtgtttactatcactatccccattttacagatgaggaaactgtggcacagagtggtttagcttgtcacaggcagtgagcactcacacacaggcattctgtctctaaagctaaactacccctacacttaattagctgccatctgatacctgttgtatacgaattgctatggcagcaaatagccagtgagggcaaggttcaagggaggagatggtagttgagctgggtcttgtaggttgaagaatctgccagcttataagaaggacaagggcattccagggagggcaaacagcatgtgcaaagtaccaagggcttgaaaatgcaccccaggtccatatcaggaatacattgcccagtgtggctgcagccctgtgaggactatgggaagaaagagagggagggagggagggagggaaggaatttggatctcattgtagaagcagtgaggagccttgaactactttcaacagggcagtggccaagtcagatattttagctcgctgctgctgatggccctctgtagagcgcactggcagagaccaggtggaggcagggatctggggtcaaatgatgagatcagaatctccttagtgggtgcctccaccctcccctacaaccaccagtacaatttgaggagtaagcacttggaagaacagaagaagtaaaaggtcgagcagaaacaatgctgcctggcatggatgggcacctacttcccctctccccagctagggagcctgcagaaggtggcagctacgacaacatctaagacgcaaacgttccagaaaaggatggtggggaagtgagggagcttcccggctccccagggttctagcctctcccaccccctcaccctacctgccgtctcaggacccctccgcagtccgccggctcaccctgactcaactccaagcccctgcagcctcctggagccaccactgcc

SEQ ID NO: 95763 - DNA, 21066 bp, Homo sapiens
aaatgggaacccgggtataagtcacctagcttgtgctgggtacacagcgttggtgcttggcaagaggaatgtcccgtctttgaaccatggtaaggggcaggggataggaggagaaagtgacaggtaggccactgtttactgaaccccatgacgtgccacacactgtgctaagcattttaacatgatctcatctagtgctcctcctatgaggtagcaactattatccccacttgactgcagagctttgtaaattataaaggtctatactcactctgtcaccaaggctgatgtgcagtggtgctattatagctcactgcagcctctatctcctgggctcaagtgatcctcccacttcagcctcccgagtagctgggactagaggtgcaccaccacccctggctttttttttttttgtatttttatagagatggggtttcaccatgttgcccaggctggtctcgaactcctaggctcaggggatccttccaccttggtttcccaaagtgctagaattacagtcatgaggcaccatgcccacccatgttgatgattcttattattaatcctgactggagggaagttgggacagacagtccttggggcacctgtccagatggaaaaatgtatggagggatggaggagaggaggatgtgcatttggaggagaaataatcattgaaagcaaagatccttctctgaaagttaccttctccagggaaagggtgtttggattcactttttttgaagtaaggagtaggcaggggaaggttctttaagtggtaaaaggacagctggccccttcctagagctcagtgaagaaatctggtcatctggggagtaaaggggtgggcagaccaagtccagagggagcccarcctgagaatccacaaggtgcaggctgggcactggggagyaggcaaggcttgtagacagtggctacgtggacagaaagagcaccaagacaaccgatagcaggctctggggccaggaaaggggggctggacaccaaggaatgcagatggacagtggcaactgggctgcccccttcccctatatatagacattcccaaggaaagctcagcagggctgggccaagctaaataaggcctcccccaggcaggcagggtgccaaagggtgagggagacccatgggattccaatttagtttttattgttttttggttttttggggttttgtttttgagacagactctcactctgtcacccaggctggaatgcagtggcacaatctcggctcactgcaccctccgcctcctaggttcaagtgattctcatgcctcagccttctgagtagctaggattacaggcacataccactacgcccagctaatttttgtttttggtttttttttttttttttttttgagacagagttttgctcttgttgcccaggctggagtacaatggtgcaatctcggctcaccacaacctccgcctcttgggttcaagcaattctcctgcctcagcctcccgagtagccggaattacaggcatgagccaccatgcccggctaattttgtatttttagtagagacagggtttctccatgttggtcaagctggtctcaaactcccaacctcaggtgatccgcccacctcagcctcccaaagcactgggattacaggtgtgagctaccacacccggcaaattttttactttttgtagagacaaggtttcatcgaccgggcacggtggctcaggcctgtaatcccaccactttgggaggctgagatgggcggatcacgaggtcaggagatcgagaccatcctggctaacacagtgaaaccccatctctactaaaaatacaaaaaaattagccgggcatggtggtgggcgcctgtagtcccagctacttgggaggctgaggctgaggcaggagaatggtgtgaacctgggaggcagagcttgcagtgagccgagatcacaccactgcactccagcctgggcaacagagcaagaccccgtctcaaaaaaaaaaaaagtttcatcatgttggccaggctggtctcaaactcctgacctcaagtgatccgcctgcctcagcctcctaaagtgctaggattacaggcatgagccactgagcccagcctttgttcttttgtttattcaagggaataggtaaggcccaaattgcttaatgtagccaagcaaggtcccattggcccttctaatctcactccttccctccacatcatgttgctgtctgctctgatcagactttaaaatactgctctaggctgggcacggtggctcatgcctgtaatcccagcattttgggaggtgcaggctggcagatcacgaggtcaggagttcgagaccatcctggccagcatggtgaaaccctgtctctactaaaaatacaaaaaattgctgctgggtgtggtggtgggcgcctgtagtcccagctacttgggaagctgaggcagaagaatcacttgaacctggcaggcgaaggttgcactgagccaagatcatgccactgctctccagcctgggcgacaaaaggagactgcatctcaaaaaaaaaaaaaaaaaaaaaaagactactctaaacaccaccttctatgaaccttcaagcctttgcacatgctgtttttttctgccagaaactcccatctttcctctcttcatctgtctacttccctatcatctttctaagctctaacatcacttcctcggggatccttcccccactgtgtccagaccagggagtccaaggtggtctccagtagtttcctcaatcatagcactgagcataccttatgctcacaacccattctatgttctacagatcatcacatttcccagtgctcagcacttgctatgtagcaggtgttcaacagatattatattctacataagaataactgaactggatggtatttagttcaatataagggggaacttcctaatagtcatagttgaacaataatgggaacaggtggcctcaggaggtaatgagctccgtatcactgagtatacccaaacaggagctagatgaccatttctcagggaggctgtagggagatatccatacagaatttaagaatgggggcagtggctcacacttttaatcctagcacattgggaagctgaggcaggtggatctcttgagcccaggagttcaataccagcctgggcaacatggcgagacgctgtctccaattaaaaaattaaaataaaacaaagaatggtgggtggtagctcatacttgtaatcccagcacattgggaggcagaggtaggaggatctcttcaggccaagagttcaagatcagcctgggcaacatgcaaccccacctttacaaaaaataaaatactagccaggcatggtgggcacatatctgtagtcccagatacttgggaggctgaggtgggagaatcacttgagcccaggagtttgaggctgcagtgagctatgatcgcacccctgcactccagcctcacaacagagtgagactctgtctctgaaagaagaggccgggcacggtggctcatgtctctaatcccagcactttgggaggctgaggcaggtggatcatttgaggtcagcagttcgagaccagcctggccaacatggtgaaaccccatctctactaaaaatacaaaaattagccgggtgtggtggcacatgcctgtaattccagctacttgggattacttgtaattccagctacttgggattacttgaggcaggaaaatcgcttgaacccaggagatggaggttgtagtgagccaagagtgtgccattggactccagcctgggtgatggagtaagactctgtctcaaaaaaaataaaataaataaaaataaataaaaaaggaagaagaagcaggaggaggaagaaggaagcaaaaagaagaagaaataataatagtggagaatgcgcaaccttcagatctcctagttctgactgtttatatgacccagcataagcccttcccctcactaagcctcagactacctatctgtaaaatggaggtgataggccagatttctgaggggccctcctgctctaacaacccatggtttcatgaagaccagctttgtgcccagacatgtaaggcatataccgaaggacaagttattttttaaccaatggttggtgaatgagtgagtgttgaattaatgaatgaagtatgccttttttgtcccaatatcttgcccataagccaaatgaagagtaattcgaggtttgaaattgtgcaaactggccaggcacagtggctcacgcctgtaatcccagcactttgggaggtagaggcaggtggatcacttgaggccaggtgttccagatcagcctggccaatatggtgaaaccccacctctactaaaaatacaaaaattagccgcatggtggcacatgcctgtagtcccagccactcaggaggctgaggcaggagaattgcttgaacctgggaggcagaggttacagtgagccaagattgcatcactgtactccagcctgggcgacagagcaagactctgtctccctctctaaaaataaataaataaataaataaaattgcacaaacttaggcttaaaatcccagcccctctatttcccagatgtggatcttggggaagtcactttgcctcagtttcttcatcttgaaaatggaccattaatgtccagttacagcctcttccccaggacgctgtgagggagagatgtgacagtaaagtgcctagagcaggatgtagaaagtggaccctcagaaaataagaaccccagcctttctgctcacatgggagggcagggagctgaaataccttctgcttatcccaaggcattttcccccacccttctctcctgtgccactcagaaagggtaggagctactttggagagattttgattttatttattgtattgtataactatcaaaatctgccctaacaactgatacctaggctttgtgacaggaagccacaataactttttcttgacctgcagctgccctgcggataaaagataaaacaaagctggggagccactgagattatcaggcctgctgcacaggaaaagggcagtatgcagcaggggacctgggctccaggccccatactcagaaacctctgagggaggcagaggcaggtggatcacttgagcccaggaattcgagaccagcctgggcaacatggccaaatcccatctctacaaaaaatacaaaaattagctgggtgtggtggcgaacgcctctattcctagctactggggaggctgaggtgggagggatgacctgagcccagggaggcggaggttgcagtaagcagagatggtgccactgcactccagcctaggtgacagagtgagactccatctcaaaagagaaagaaagaaagaaagagagagagagaaagaaagaaagagagagagagaaagaaagaaagaaacctctggcaagctgtgtggttaagccaagtaactcaccctctctggtcctcagtttccctgtttgcctacttcccatgtgtgaggttcaaatcagattgtgcaagcctgtgaacactgtagaaacaataatcattatgtaagtgatcatttcgtcagcctttgctctatgccaggcacgggacgagcgttcttacaagagctgcaaaattagttttagcagtattgttcctgttttacatatgagaaaacctaggctcagcgaggtcagattccaaccaacccaaatcacgcatcttctcctggcccttcgttttctctcgggagacatggcctccctactattgcataattactttgtgaagttaaagagcgttgggtggaaatgagtgggacagattggagatgacgtgggtggggtgggaggattcaaggagggtacgcgcctggccggactgggatgactctgcggcaggcctgggactccctcaggccgacccaggcttcccaagtccctcctggagccaagggcccgggattctcgggcggctcgggcgagcgggcggggcaggaggcggggcggcggcaggaagctgcccgagcggcgctctgagcggcctgagcccrgcggagccctgcagaacccggccgayctccatgggctgcggggggctgcacccggacccctggggcgcggcgcgcccctgaatgcaccgtgggacgcaggaggtagaggcgcacgaggcggcgcaagagacatcgggagggtcctgagcccctccggggaggaacgcggtcctaggctgagtgggttggggggaaagcgatgctggctgggtcccctggttcgcaagacctcggactgccagggggtggggcctcaccgcgcccctccctctccggttcgggccccgcccctcctcctcctgcgccgggctggggtacccctcctccgggatccggtacacagcgtcgcgcgctccccccagggtgccatggcctcccggctcctgcaccggctgcggcacgccttggccggcgacggccccggggaggcggcggccagtccagaggccgagcagtttccggagagctcagagctggaggacgacgacgccgagggcctgtcctcccgactcagcggcaccctcagcttcaccagcgccgaggacgacgaggacgacgaggacgaggacgacgaggaggctggccctgaccagctgcccctcggggatgggacgtcaggagaagacgcaggcgagtgcaggaggacggaggcgggaaccctggggctcgattaggcctccatcccagccgcgttcccagagcatccagggcgctaagttgatccagctgaaactcccacacttcttaaagcgcctgggccacctcttggctgtgtgaccttgagagagtcttaacccccctctgagccaagttttcccttgtgtcaagtgggagaactcactctcatctcagaattgctgcaggcattaaatgtacagggcttgggatccgaatggaaatgatgtattaacgatattttgagggtggagctattaatttagcccctactgtctgccaggcacggtgtttggctcctcggtgcctctctgtccctcagtttccatttctgtaaaaagggggtaagtcctgcctcacactgggaggatgagtgaggccacgtcagtggttgatgtcgaccctggccctaggcccattgatatgactggtcatgtgtctgcagaacggagccccccacctgatgggcagtggggcagtcagctcctggcgcggcagctgcaggatttctggaagaagtcccggaacaccttggcaccccagcggctgctcttcgaagtgaccagcgctaacgttgtcaaggacccgccctccaagtacgtggtgagtgagggtctagaacccctgggctgtgagtccagaagtatggctaggagcaagtagggaagaccccaacttcctgaggggtctatgtagttataaatggttaccttgtttacaaatggggaaactgaggtcagaaaggggatgtaacttgagcaaatcctcacacaagacttagtttccttgagactgactgaagtgggrattaaggaccttcctcttaacctggttttgagactaagagaactggtgtgtgcacttccccacccagcccacaaggtttttgcaaattgtagcaagatgtgagatacagagagacagatgttatctgggtcaaacttgagatccaagttgcatgggctggtagttaaggaaataggctttcgatccagaccaatcttgactcccacttatttccagttgtttgactctgggtgagttgtttaaccttggtcatcttccgtttcctcattatagcaatggggaaaatgcagaagattacagcaggagttaaatgagacaatggacaaaaagcccttagcagtgtgcctggcattatgacgtggtcaatgaaatggtagctatgtcatcattatttaactttgggttgaaaatgtttgtcatctagggcctgctgtgtccttataacgcacaggtcaatcagttctcaagcacccgaccttgtccctaagggctagacttagagggttggtggaggttaggatgaagagcaatgttggggaggaccttggagtcccttgctgttttccttgctgttgagagactgacttggagaatgaggtctgctcctttaatgcccacagcgactcctgctccagtcccttttcaggccaggcctgaaagccagctgagctggccactcctgtcagtggcagctctccatctctcactcccctcctcttcaccacccttctccacctctgactcagcaggagggggcctggagcccagtcccacatctgggcctctccacccttttctgttgctgttagtaagcaagggccacacccatggggtgactactccaatttcagcagggaccgactccgattattgagtcttttaaaaaaatttttgaggccgggcgtggtggctcacgcctgtaatcccagcactttgggaagccgaggcgggcggatcacgaggtcacgagaccatcctggataacacggtgaaaccccgtctctactaaaaatacaaaaaaatagccgggcatggtggcaggcgcctgtagtcccagttacttgggaggctgaggcaggagaatggcgtgaacccaggaggcagagtttgcagtgagccgagatcgagccactgcagtccggcctgggcaacagagcgagactccgtctcaaaaaaaaaaaaaaaaaaaaaaaaaaattttgagacagggtctcgttctgtcactcaggctggagtgcagtggtgcagtcataactcactacaacctccaactgggctcaagctatcctcccacctcagcctcccaagtagctaggactacagctgtgcaccaccacgtgtggccaatgatgaagtctgaagtggcaaaggtctcagaactctgggttcatacactggaaggggacaccaaggaatagttcagaggctgagaggaatgggggtgactgtgggtacctggatgggaagggatgacaagatagagcaggatggccaagtatgccccggcctgtgtctggagaagcaaggcacctcctgtgtacaatggggaccctaattccccactcaacttgtgggggtgaagagcacaggctttggaatcagatcaacctgagtttaaatcccagctgggctgttttccagctgtgtgacttacggcaagtctttgagcccttttccccctctttgagcctgcttcctcagctgtcagagataaggaccttccttgcagtgctgttgtgatgattaaatgaaatcacagatgtaaagagtgcttggtacaacaggaggcacagggtaaatgcttgggtaatggaactactgtcattatcacccatctggctgcatgttacaaggtcaatgagataatggatacaaaatgtaaactagatgaacataaaggcttattatatagaccagtgtgtcctgaagaaaactggtgtcctaaagtgtgtcctgcagaaaactagttccctggaatgttaatagctgtttctaaataaaggttttgcaggcaatatgttttgagaatgcagagttaaatgagaatacaataagtttctttattgttaaagtatttaatccctaatagtgatatacactgtgaatcttcaagaggacagagtaagcaaacctaactgaccaggagtggctagagtattgtcagttccacagaacaaatgtgagagaaagatctggatttggtgttagggtgcctttaacatctaacactggttaactctccttttaaacctgttggcttggcattataggttaatccayattcaggttctcagacctgggaggcggggarcttcgtgatcatcttgttcagtgttttccaaacctcagtcattccaatacctccctgattcttgtcctatctaaaaatgccacttgtgtccttttcttcttaacatttttctttaaatgaacctatttttttttctttatctttttttttttcttttttgagacagagtcttgctctgttgcccaggctggagtgcagtggtgcaatctcagctcactgcaacctccacctcctaggttcaagcaatcctcccgcctcagcctcctgagtagctaggattacaggtgcccaccaccatgcctggctaacttttgcattttcagtagagatggggtttcactgttggccaggctggtcttgaactcctgacctcaagtgatmtgccgcctcagcctcccaaagtgttgggattacaggtgtgagccactacgcccagccgaacctattttttttcttaaataagtttatcgagacggagtcttgctctgtcgcctaggctggagtgcagtggcgtgatcatagctcactgcagccttgaactcgtgggctcacatgattctctgcctcagcctcctgagtagctgggaccacaagtgcccaactaattctttttctttttctttttcttttttttagagacagggtcttgccatgttgcccaggctggtctcgaactcctggccttaagctgttctcctgcctcagcctcccaaagtactgggattacaggtatgagccactgtgcccatcctttaagtaattttaaaagacaacttcatagcactaccgtacgtggaaagtctcacttgccaccgagagaagctagccataaaaataaaaggtgaggcacggtggctcacacctgtaatccccgcactttgggaggctgaggtgggcagatcacctgaggtcaggagttcaagaccagcctggccaacacggtgaaaccccgacactactaaaaatacaaaaattagccggatgtggtggtaggcgcctgtaatcccagctactcgggagattgaggcaggagaattgcttgaacccaggaggcagaggttgcagtgagcggagattgtgccactgcatgccagcctgggcgacagggcgagactaaataaataaataaagtaaataagtaagtagtgaaaatgaaacgtcattaaatcttgcctagatgttgttgcctgaaggaggccctgacctgagatccactttctgactcttttctaaaaatggagatgagaagtgttagagaagtactttttttttttttttttgagagagagtttcactcttggtgcccaggctcgagtgccatgagcaatctcggctcaccacaacctccacctcccaggttcaagcaattctcctgcctcagcctcccaagtagctgggattacaggcatgtgccaccacgcctggctaattttgcatttttagtagagacagggtttctccatgttggtcagcctggtctcgaactctcaacctcaggtgatccacctgcctcagcctcccaaagtgctgagattacaggtgtgtgtgtgagccactgcaacctgcccaagaagtcctttttttaaaaccaaactgagagctggccaggcgcggtggctcacacctataatcccagcactctgggaggcaaaggcgggcggatcacaaggtcaggagatcgagaccatcctggctaacacagtgaaaccctgtctctactaaaaaatacaaaaaattagccgggcgtagtggcaggcgcctgtagtcccagctactcgggaggctgaggcaggagaatggagtgaacccaggaggcggagcttgcagtgagccgagatcgtgccactgtactccagcactccagcctgggcaacagagcgagactccgtctcaaaaaaaataaaaaaataaaaaaaccccaacaaaaccaaactgagagcttctcaatttgtagtcagaaagattaaaaaacaattaggctgggtgtggtgctcatgcctgtaatcttagcactttgggaagcctagctaggaagattgttcaaggccaggagttcaaggccagccctagcaacatagtgagaccccccctcatctccatacaaaaaaaaaaaaaaaaatttttttaaatagctgagtgtggtggtgcatgcctatagtcctagctacttgggaggctgaggcaggaggaatgcttcagcccaggaggttgaagctgcagtaagctatgattgtaccagtgyactccaacctggccaacagtgagaccctgtctctaaaaataatatataaaaggggaccaccttctgatacagtgatatttactctagtgcacaccacctaaaaacctcaggtaccaatacttgtacatgtctcatttttggacaaacactgacttgaccgagcacttccttcactagaaacagaagtggacccagagggggactcccttgcctgggtcacacagagaaggagtagctgacctggggttagaacttgagtcctaggccagtatacttttcacagttatggcagttgtggctatctacagacctgtcctctgggtctagtttggaaaagcctgaccagggatgtggaggccaggtgtccaaagtggaacaagctccaagctggtcctaaaggagccccaagagattggcyggggtttcagcttatgtctggttttccagagggggctgtcagaagaactaactgctctatgggaagggagtacaaaaaaaggggcagcagccccgggcactgaagctcatctctgtctttctctcttcttgctgccttgggcctgggtcatttcagacaaacctcaggtaagatgggactgggcttccccgccactgcgcagcagctcccgccctcctgggtgctgtcccaggggtgaaaggaagaggtggggaggtacagctgggagtgtgggggatggggaaggatggggagggaacgggcccgtggacaacttgcatttgccctgacacccaccctccctgcagctctacaccctcrccgtgatcggcccaggaccgccagattgccagccagcccagatctctcgccgttactcggacttwgagcggctgcmccgaaacctgcagcgscaattccggggcccaatggctgccatctccttcccccgtaagcggctgcgccggaattttactgcagagaccattgcccgccgtagccgggcctttgagcagtttttgggtcacctgcaggcagtgcctgagctgcgccatgccccggacctgcaggacttcttcgtgctgccggagctgcggcgggcacagagcctcacctgtactggcctctatcgtgaggctctggcactctgggccaatgcctggcagctgcaagcccagctgggcaccccctctggcccagaccgccccctgctgaccctggctgggctggccgtgtgccaccaggagctggaagaccctggagaggcccgggcatgctgtgagaaggccctgcagctgcttggggacaagagcctccaccctttgctggcaccctttytggaggcccatgtccggctctcctggcgcctgggcctggacaaacgtcaatcagaggctcggctccaagccctgcaggaggcaggccttacccccacaccaccccccagtctcaaagaattgctcatcaaggaggtgctggactaacccttgcctagatttaaggccactgtgaggagaggggttgccccagaaggcaggggaaggacctgatgagaacagaatagctgggaggctgcagagggtgctgggagcccctagaagttccaaaagagaatgtgaagcagatcaaggaaacttctgttgagctaggctcagggtgagctttggctggggttgcccttgtgtagtacagggaagtctgacacagcctctccagcctataaacagccggggggctgtggcacaggttggggcaatgttcccttgttggtgggcccccaagctggcaaggcctcttggctgaaggccagggactctgcccctggagtcctggagttaagggatgaaggcaaggctgcaggtctggcccaggggaattaaaagccagccactccagtggtatcagtctctttattggatgtgagggccaaaagggactgtaactcctgtctcaggaatggggatagatgggaggttcttgaagccccaggcgaagctggtacctctggctacagcttgctctctgaracctggggcttcactcggatcacgccctcctgggcacaggtcacagctaggactccatcctgacgccacagccgcccatggaccagcccccgagagccacctgtgggtgaggtgaagggtgatgatggcctgcttcagaacagccaaatacactttttttttttttcctgaaacagagtcycactaagttgccaggctggtctcaagcgcctgggttcaagggatcctcccgcctcagcctcctgagcagctgggattacaggcgcacatcaccatgcccaacctccaagtggacttcttgcaaagggtctggcccagggcagggctgccccacacaagggtgcactgagtgtcgtggctgctccaaatgccccttcatgagcttattatggaccgtcattgaggggtaactcctcccacaggaaccccagttgacagtttaaaagcactttcacacctctcctcgcttcctcaaaaagatcacagagggaggagctctgagaacagtctccttcaacagytcggccaagcagaactgctgtacctctgaccacttgtgttaggaaaactatcggctccctgtataataaatcaagccaggtcctccaagtggtaattcatgaaaaatatccccactaccaccaccaaggggaagaarggactcagaagagaggacttgaggccatgaggtctggcctcttccctccccatctggagactctttctccctygctggctttgggcccaagtttgatgtttatgaggatgattgctggtttcycttacacatagcagagctcactcagttctcacagtagccaaatgaagcagttatgtgttgtccwgttttccagaccaggactgaaatccagagagggtcaggaatttggccccatgatgaagccaaatctgaacccatgtcctcacttcaaggttatcaatcttggattgtgatgctattggtacttgagaataccccttatctgagtataaagaatccttgagttttgtccttggtttatcaagcaaagcttttcttcatttgaaatgtactcccttggaaaggaggtcagggttctgaagctagacattgatgaacgagtcttgtttctctcccctgcaaggaaggtccaagcaggcccttagggaccactgaatgccccgatcccaatcaggttaatcagaatcacttagagaacttaaaaatacagtttcctggaccttatccaagacctactgagtgagaatcttgagggtggaatcagaatctattttgaaaaggcatccccaaatggcagtctgatggactgcgggtttggataccactgctgtaatgtaaccctctttgtttagatgaggaaactgaggttcagatggaagatatgatttgcctattgtaatacaaagaatctgaactggttttgggactagaactgggtccctgggagaaggtgaatcacatttccagcacattctagaaatttagagcagagcaggtgtcccggcctcaccctctcattttgaagatgaagatgccaaagcctgggagggaaggaaaggaagtgacctgtgcagcgccacacaggaagtcgggaaatcagcatcacccaagaaagcaggctcctgccactcaaggtcagtgcccttgtcccacacrgccccacactyaccggcccaggggctctcgcattcatagagcatccagtggtcagctcggaagggggcgtggaaccacatggaatggtccagtgagaccatgaagtgcaccttgtgctgccactggtgaggcagcagtgcagtgcccaagaaggcatagtcggagatataggcggccacgcagcagtgcatcttcatgtcgccctcgcctgcaacaggtccccatcagccctgggctcctgggctttccagctcaggacctgcacggaggtagggggaaaagggactcccgtgcatgggtgtgcagactggttgctgcacaagagcgcttggcctacagtgtgtgtgtgtgataggggagaagtgagatggcgacttggggagggcaggggtgagcagggactgaaattcagtcttcaccacccaagtctcccactctaggccccaaaaggggtgtcttcttccaatttgcacaaagatactttatagttagcagcaaagctggacaacaaccccagcgaggtgccttttgccttcctcagaaaggccttgtgtcgggattatagtcatctccaccttctccccatgcaaagggctgagagggcccaggtgagaagctaagccaacttccccatcatgcagataaggaaacaggcccagagaagggaactcatgtgcccaaggccacacagcaaatgagtggtagaccccttggagagtggtttcctcccatccatggggtactcttaccaatatagccccgggctcgcacccagaacatctgtttgggctccattctctgcagctggctcaggggggatgggtttactggcttgatctcawtggggacctcctgagcagcaattcggttgagcgccaatgggtacctcttttggaggttagggtccctgaaagtaaagggaagagggtcggggtgagacccaggaagagagggagtcacatctgcattgcctcttctgactcccctcattcttccacagggacccctgatatccccaaagctcccctcccctgtggcaggcaggatagtgcagcgtttgaatcccttcttggccacttacgagccatgtggtctcgtgctaattagtaatctgagtctattttcccatctgcaaaatgtggataatgatagtaacctacctcataaccaacactgtgaagacaagatcatgaatatctaaccaacacatcatagtaataaggcataccctgtaatatgcactgttctaagcattgtacatacaatagtattcctcacaacaaccctgtgagataggtactattatcacccccatttcatcagtgaaataagcacagagtccaggtagcttgcttaaaaattggagagacaggatttggactcaggcaatctgggtccacagtatgattattttctatttttttagagacaaggtcgtcttctcacccaggctggagtacagtggcgcaatcagctcactgcagtctccaactcccaggctcaagccatcctcttgccttggcctcccgagtagctgggactagaggtgtacgccactgtgcctggctaacatttttattatttctttattttgagacggagtctagctctgtcacccaggcttgagtgcggtggtgcaatctcagctgactgcaacctccgcctcccaggttcaagtgattctcctgcctcagcctcccgagtagctgggattacaggcgcctgccaccatgcccagctaatttttgtatgtttagtagagatggggtttcactgtgttggccagggtggtctcgaattcctgacctcatgatccgcccgcctcagcctcccaaaatgctgggattatttttacttttttttgtagagatggggtctctttatgttgcccaggctggtctcaaaatcctggccttaagtgatcctcctacttcagcctcccaaagtgctgggattacaggagtgagctgctgtgcccagccacttcattattttaaacactcaagaaacaggctgcctgacttggcctgagttaccaaaccctacacagtagggaacattgcatccccccagggggaggagcccattccaaggaactcccttcaatacagtgacaaccacccatagtgctctgcacaggtcctgccattttcacccctatcctctggagtgctgttggacagaacctcctatgatgatggaatgcctatctgcacagcacactatggtagccactagccacatgtgactatggagcacctgaaatgtggctaatgcaactgaggaacagaattgttcattctactgactttggtttttttttgtttttttttttttaagacggaatctcgctctgttgcccagtcaggagtgcagtgactcaatcttgcttactgcaacctctgccccctgggtccaagcgactctcctgcctcagcctcctgagtagctgggattacaggcacgggccaccacgcctggctaatttttttgtgtgtgtatttttaatagagatgaggtttcaccatgttggccaggctggtctcaaactcctgaccttgggtgagccacccgccttggcctcccaaagtactgggattacaggcatgaaccactgcgcccggacctatttaattttaattaatgtaatatagccacgagtggctagagactaccttattaacagcacagatctaaattcaaggtcctttaacaatgtcttcctttcatttcagcaaacatttgtcgaactgcaaccacacaccaggccctgtgttttttctgttaatagtgatataactacaattcactgccattgtgctagttagtactagcacgctaagtgccttttctctcttatttaatcctcacagcagccttatgaggtaggaatatgattagcaccattttataatggtgagtactggctcagagtgggaaagcaacttgcccaaactcacacagctagtagggacaaaatctagaattgaatccaggcctttcaggttcccaaacccacatccatcccgtcatactctgctgcctccccagtatctaacacgagatagagacattctctccttatgatacagctaagaagtaggcagggcagaaatgagcattcccattttttagaagaagaaactagggccctggggagttgggcactgtcccacagcaggtgagcattcacagaggcacagccctggayagaatccatgtgtctatcctttgtctggacccagagctctttcccctgtgccagcatttttcaaacttgattaggtgtgatccaaataaatatattttaccaggtattcaaaatatctaacatgctccctggtggtctaatggttaggggaaaatacatatttgtatttttgtacatatgttttatatacataaaacatgtggccgggcacggtggctcacgcctgtaatcccagcactttgggagaccaaggcaggtcgatcacttgaggtcaggagttcaagaccagcctggtcaacatagcgaaacctggtctctactaaaaaaatacaaaaattagccaggcatggtggcatgtgcctgtaatcacagctgcttgggaggctgaggcacgggaattgcttgaacctgggaggcagaggttgcagtgagccgagatcatgccactgcactccagcctaggcaacagggcgagactctgtctcaaaacaaacaaacaaacaaaaacatgcactaatgcaaaggcagtgaccaaacataggccatagcgctgcagctctccagaggacactcactcctggtgtgcattaagtcctaagttgctggaccaggggcctgggggagagagggaatcacttagggggctggggaggtggtacttaacaagtggttacggaagtatttctatatacatatatatataaaatatatatatggttttttttcccaggtatggtggctcatgcctataatcccagcactttaggaggtcaaggtgggtggatcacctgagatcaagagtttgagaccagcctggatagcatggtgaaacgccatctctactaaaaatacaaaattagctgggcatggtagcaggtgcctgtaatcccagctacttgggaggctgaggcgggaggatcacttgagtctgggagtcagaggctgcagtgagccgagatggtgtcactgcactccagcctgggcaacaagagcaagactccatctcaaaaacaaacaaacatgtatatatataaacaacaacaaaatatatattctttttttcttttttcagacagagtcttgctcttgttgcccaggctggagcacagtaacacgatctcggctcactgcagcctccacctcccaggctcaagtgatccccccgcctcagcctcccaagtagctgggactacagacacatgccccgacrcccggctaatttttgtattttttatagagacagggtttcaccatgttgcccaggctggtcttgaactcctgggctcaggtgatcctcccacttgggcttcccaaagtgttattataggtatgagcccccacacccagccccagccttatttttaaattagagatggagtcttgctatgttggcgaggctagtatccaactcctggtctcaagcaatcctcctgccttggcttcccaaagtgctgggattataggtatgcgccactgcacccggccaagcccttcattttataccatgacccagtacagacacacaccagaaacacacatgactaaacctcaagtttcacaaaaggattcttgcccttaatacatacatattattcactccagtatcttcttttctaatctgtattttaaaaatgctggtcaagacccactaaaggattctatgacccacaaacagatagcagctgcattttgaaaagtctgccatggagcctccaggtctctcaccttaaatactggtcaatgagggtctcacagtcaagcagctcttctggtggtggcacagtgggcatggagaactggtgctgcatggggctgggctgggcctgctggaaggaggcctggcagatgaagatgggcttcccatgttgcacggccttcacagagcgcaccgagaagctcgaccctgttcgtgtccgctccacttggtacagtactggcagcttcgggtcccctgcagtgggcacaaggacacagtgggtccacaggccctgtcatcatcacaacgcctgacaggcactctactactcatcttccattccatttcatctcagtgactactaactgaggtctgctaaggtccaggcccagggatacagagaccaccaggccctgtcatcaggcttctccctgtgcaggtgg

SEQ ID NO: 95764 - DNA, 67346 bp, Homo sapiens
tagacaaatgacactgcaggaaactaaaaagtttctgcacagccaagaaaacaatcaacagagtgaaaagacaacctatggatgacagactatatttgcaaaccatacatccaataaggagttaatatctcaaatatataaccatgtttattgcgctcctactgattgacaaagagctcaactcaatatcaagaaagcaactggatttaaaaatagggaaaaaaaatgagtagacctttttcaaaagaagacatacaaatggccaacaggcatatttttaaaatgcttaacatcactaatcagtaaggaagtgcaaatcaaaaccacaataagatatcacctcatacattttggaatggctatgatgaaaaagatataagataacaagtgttggtaaggatatggagaaaggggaacacttgtacactgatggtgggaatgtaaattagtacaaccattatcgaaaacagtgtggagtttcctcaaaaaaactaaaaaatagaattaccatatgacccagcaatcacacttctggctatatatccagaggaaattaaatcagcaccttgaagagatagctgcagtctcatgttcgttgcaccattacgcataatagcctagatatggaattcacctaagtgtccatcaacagatgaatgaataaagaaagtgcaacatacatacatatatatcacacacacacacacacacacacacacacacacacacaagaatgttattttgcctcaaaaaagaagaaaatcctatcatttgcaacactgtggatgaacctggaggacgttacactaagtgaaataagccaggcatagaaagacaaatactgcatgatctcattcatatgcggaagctaaaaaattgaactcatagaagtagagagtagaatggtggttactgcgggttgggggatggagaaagttggaaggtattggtcaaagaatacaaagtttcagttacgcaggattagtaagttctggagagctaatgtacagcctgatgaccatagttgataataatatattgtatacttgaaacttgctaagagagtagatcttaaatgttctcaccacacacaaaaaaagataattatgtgagataatggagatcagctgcattgaggcaatcataccacaatgtataaggctatccaaagtcatgttgtacaccttaaatatttaatatatgtatcattttattagtcaattatagctcagtaaaactggggaaaaagaaattcagtgatgcatccatggataatcattattctctgtaaaatatacatttaaattaattttccttttacatctttctttttacttaggagtgagtagttgagtaaatatcataaaataaaacagatattagttacttaggatatactcacatagtcaagaaatcttcaaatacccagataaagtaactgtagatgcaaagccagagagctggaaccggtgtttctaagattctgtacttccatcagggagatttaaggctagatataaaacagtgtttactgagctcctacttgattaacaatgaggatgattcaaagacatttgccatgagaatataacacaaatatacttttcactctaactttatgcagatctgttttgctgaacagtttttgatctagtctgagaaaattaaatgttgaggattaaatgagataccgtgaagtgactagtggtaggccctcagtaaattcccaatgaaaggttgctattaatatgattatcctgacaacaaccaaatagagtagagggcaagtcctcctactattatgctcgttttacagaagaagaaactaaaatctgtttttaaatgtttagtacaagctggagtcagactgataattggaataacccctccaaatgtctcccaaggataattcgtaactccagattttcagatggatatcatctccaactaagtatgtacagattcttgagaaatttgaccagccaaaggtacctgcattctacgacttgggatgacaagccaggctccctaactgtggggtacctcaaataaccaacccacttacgtatttagtttcctgctggtaacatggaaattaatacaactaaaattttagaagcaccgtcatttaccaatatacaaatgtcatgtgttgggcaatatgtgtgttgatgaaaaggtagaatttcctaatatccttttttttctattccttttacctatgcaattcattgatctgagatgtgaaacagcatgtgtgtcggaaaagagaaaaaaaaggagaaagatgtacagctatgagggccacagaaattattactgagtgcctgaagacacatagtgttgaattagtggtatggcttataaccaacttctaccatcatcacagattatcataaactcacaagggaaaagaccaagaagaggctgggaagagaaccttacacaagcttttccatgtgtgacacatccatagtcatatggctattagtggccaagtcagtactttagaccaggtctgacaacaaatctactcctccatttctaggatatttaatcaatgtttccttactctcctacccactcttcacatttcattctgaattgtatgtcaaatagaccgaagactaagccagagttaatgtgttgctttacccatgatagataagccaagattcccttttaattttcttaacatgttgctctcctgttgcaagtaatttgtgttttgattcgcaaggacaaaccagagagggataaaaagaaatcagtactctttgataaaatttatatggaaacaagaatatatttcaagcagtgttttaaactgccaagcatagaatataacaagtgttgactttcctaaaagacatttgagtaattccaactgccatttggggtgggatggtggctggacaagattgaatcatgcagagtaaaataattttaaagtattctattttcatgtttaaaacaatattgtaatgcaaaccatttatccatgatgctaaaaaaaattctcactttattttcgaatgtggatgctaaagatgtgtgctatgttttttgctggtggcgttctttttttattattattattattatactggtggcgttctactgaggggagttttaaggttgttaggggcagagacaatgtcacctacttcatgttttgggcatgtagggagttctcagtgaacaatggtcttgttaaatctataattagaggaaataagaatggcaagaataaaataaaatactcagatttgtttcttccccattgccagaatcatgttagtcactagttttctacttgtttttttgggaagagctggtacattgcctcccacatgcatccgacactcctattacagcaaagtattagcaacaatatgaatggctaacatttaaagagtaccttcaatataacaataactttaaccatttttaaatattctcacattaatctgcaaagcagaatttttttttattgctcagtaaccacataaaattaactagcctgcaagatcatacagctagagagcagtattgtgtgatattgaagcacacggactacagtcgtgtattcaagacccaacccctccaatctctaccagaagttgctttacctctctaaggtttcatttgctgactacaaaatacatattgtaatttactccttcacattagattcttgtgaggattgagtgagatagtcaatggaaagaacttagcaaagtgcttgagatatatatatgaatttggaatctctccttcccctcccaagtcattgggaacataagtttacctcaaagcatggaagctagaccctccccacactagagtaatgaacagcagtgttgtccacaaatcactcagagttcctcagagagaaggacagtggtcccgagaagtgcttctcaaactctatggacaatctttacaactggcaatgtcaaaatgtgtattctgatttagttgttatgggaatgcatagattttattagactgtactttagacagggaaggaatgtcacacaagttgtagactgtattggccaggatttttcagagaaacagaaccaataggattcatagaggtagataagtgagttgcagtttattacaggaattggctcatgtggttatggagactgagaaacctcagtccaggccacctgcaagctggagaaccaggaaagccagtaacatggcacattctgagtccaaaggcctgagaaccagggaagccaataacatcactctcagtctgaggtcaaaagcctgagaacctagtgagggatgtggaggttgtgggggcagactggtacaagccccagaggccaaagccagagaatctaaagttctagtccaaaggcagaagaagaaagatgtcccagctcactaacagagacagaatccacctttcctctgcctttttttctatctgggccctcaaccaattagtggtgcctgcccacattgggtgagggcatctcctccccactcagtgcactgagtcaaatgccaatctcttctggaaacaccctcacagatatacctaaaaataatgctttactggttctctgggtgttccttagcccagtcaagtagacacctaaaattaaatgtctcataggcaatgttcaaaaaccaaaaacaaacaaacaaaaaattgagactttttttctagaccagtgtttctcaactttagctgcacatttgaaagacctgggaagctttgtaaaaaaaaaaaaaaaaaaaaaaatatatatatatatatatatatatatatatatatatatatatatttaatacaatatcagcccaaatgtcatctccacctcctctctcatcaattgaccagagttttggggatcttgtttcaagtggttctaatgaaaagcctgtggcggaactgctaccctaccagtcaaccagcatcactcaaaatctggtccaagtcctggtgtggtcctgaaactgttgcttgctggtttaagacgagataagtactgaaactgagagtaagtgtatcttaatctgttcaggctactatagaagaataacatagactaagtgactcataaacaacagaaacttatttctcacagttctagagactgagaagtcagaaatcaaggcaccagcagattcgttgactggtgaaggcccatttcctggttcatagatggcaccttctcattatgtcttcactttgtggaatggcaaggcaatagggcctcttttttaagggtgctgatcccattcatgagggctctatccttataatgaaatcaccttcaaaagccctacctcctaatactatcacatttatgattaggtttcaacatatgaattttgggtggacataaacattcagaccataacaaagtgtttagaaacttttatagcagtatgacaaattaagtttatttgtaatcaaatgtaataataaaaacagatggattagtgaaaaaaaaatagttggcttacaaagaaatacattgaaaccccttgaatgaatgatctaaataattaaacatatacatctctggaagtgaggatataccaggccccttctttaagctgttatgtcttaaagctgaaatgttaacttcagtgataaattcctcaggcagagcattggcacctggctacaacagggttaatgagcaggagtagggtaggtggggtcacaaaccaggaacacatgccctccaagttagatagctttttttcctctttaattgccgtttaaacacacatgctctcacataacacagaaggtgagagctgaatgaagttttctgggtaatggcatgaaatgttttccttatgagaartggtgttgagttacagcgtgcagacggagaacggggaggagagaaacggcagtctcaatctggcccccaccttttcttgggcttgtaggaaggtggacatgggctcccggagacaagacaagtgatatgttgaactgttcggtggctggaatcaactgctcctggagtgacctaaggccagtgtttatcagaacttagccagggccagccaagcaggcacagatgctctgctatgaaatgccacgcaggcagagactgacaagcggtaggaactgagctttccccttggactgctgcttcctgctgtgttcaggggagggggtcactttctggcaactctgctgctgctgctgctgctgctgctrcttcagcttcctctccactcaaggtaagcaggctaagggagggcaggctgctagggaaagctttgtaccatgaacaggatccgaaagtttttccgaggaagtgggcgagtcttggcatttatctttgtagcttctgtcatctggctcctctttgacatggcagctctccgcctctcattcagtgagatcaacactcgggtcatcaaggaagacattgtgaggagggagcggataggattcagagttcagccagaccaaggaaaaattttttacagcagcataaaagagatgaaacctcycctaaggggacatgggaaaggggcatggggcaaagagaatgttagaaaaactgaggagagtgtgctcaaggttgaggtggacttggaccaaacccagagggaaagaaaaatgcagaatgccctgggaaggggcaaggttgtgccgttgtggcatcctgcacatctgcagaccctccctgtgactcctaacaagcagaagacagacgggagaggcaccaaacctgaagcctcctctcaccaggggacaccaaagcaaacgacagctcagggggctccaaagacctcattcatagcagcaaaaggaactcaggtagtcaaaatatcagtacacatgggacgtgtcagtttaaaacaggagccccggaagagtcatagtcccagcagtgacacatcaaaactagcagctgaaagggacttgaatgtgaccatcagtcttagtactgatagaccaaagcagcgatcacaggcagtagcaaacgagagggcacaccctgccagcacagcagtgccgaagtctggggaagccatggccttaaacaaaactaagactcagagcaaagaagtcaatgcaaataaacacaaagccaatacgagtcttccttttcctaagttcactgtcaattcaaatcgcttaaggaagcaatctattaatgagacacctttgggaagtttgtcaaaggatgatggagctagaggggctcatgggaagaaactcaatttctctgaaagccatcttgtgattataaccaaagaggaagagcaaaaggcagaccccaaagaggtctctaattctaaaaccaaaacaatatttcctaaagtattgggtaaaagccaaagtaaacacatttccaggaatagaagtgagatgtcttcctcttcacttgctccacatagagtgccactgtcccaaactaaccatgctttaactggagggctagagccagcaaaaatcaacataactgccaaagccccctctacagaatacaaccagagtcatataaaagcccttttacctgaagacagtggaacgcaccaggtgttaagaattgatgtgacactttctccaagggaccccaaagctccagggcagtttgggcgtcctgtagttgtcccccatggaaaggagaaggaggcagaaagaagatggaaagaaggaaacttcaatgtctaccttagcgatttgatcccagtggatagagccattgaagacaccagacctgctgggtaagacctatttctcttctctttcctcaaccccaagtgctttggctgttatgtaaagaggatttattgctagataattctgtgtgatttttggtcacctagagaattaaagaaacattaatcattggatatcattcaaatatttcaccagctacagagacaaaaattctcttattagcagttgcagagttcttgttctctgagactttggtccctaccattagctcatgttcaattttcttccctctgttgaaaacctattaaaatgattagatgaactcagttcataataacgtgtatataaatggtagagcttaaagtgtaattccattagaatagtgacaatgaagtgaattcccaattttggaacttttcattattagcaagtttgtcaggaatatatttgggaaagaagcacacagaaggactcttctaggcctccctggaatcatatcttaaccagcagaattctgcctaatcataagtaatgataagcaggatagcaagagaagtgactttactccctaaaatttaatctcctttataggtggagatggtagatatttcaggagatcagttacataggaatcataatgttggaaaaagtcaatcagtccatgaccagcaaacacctacaggaggtataaaaagcataataataatcacttatatttgtagacattcactatttacaaagagcctgcatacacatagatgaactccatatgagccctgcaaaggaggaggcagtcattatggttcaaattaacaagctggcgagggcgctcagaagttacaacactttctcaaggtaatgcagttctaaagctgcccaatgggccttcagtaaccagtccttcaaaaagttaaattcctataactatatcaccagatgtggatcaaaacatagatatttaatctgattcaaatataattgggttcctggcattttttttcttggcccactgataagtgaaggtactcaacagccgtatgttcaatatctgttaactcagttccctaagtcaaacaatatttgccaggaagttggattggggaatgtcaagattgagacttagcacatgtggcatgtaaacaatggccttgtttggcttctgtagaaaattcttctttgtgatctaggtagtcagcattacattttagtcagtgttactaggaggaaggcagatacaggagaagctttatccacattagaaagaagagtctcttcattgtgatgtcggctacaaccaggtcgttttccatctcttagccatcagcaaacagctatcagccatgcactgcttataccaagcactgtgccattcacgcttctcaccctggtgataatcacagtcttgaggagaatgcagacatactcaaagatgaggaaactgaggccctgggatgctagattgcctgtggtcacaaagctagtcattgtagagaaatgattaaaattcatgctcaaaattattctgcactctcttccatctcttgccaatctcccctcaaaaaggatcctaaaaattgtgttggcccagctctaatctaaagtcctgtgtatcacaggattacacatgccagctttgaacacaaagtgcaaggaaatgaagtagccgttaaagcagtttcattttaacatgcccttattgacctggcaggctgctagggagtctggggaggaattagacactgcacagaagcacaagctccagttccaaaccagagaaaaggcacatgcgtggcgggggtgggggtgctcaaagcaagtaataacgatgttatcactagtgtggctcattgaaagctcggggactcccagtgcttcttagtttctatactttgttctgtagaagttaagcattgcagcccaggaaagttacagtcaggctctgtcttctgaaggaggttgtcccaactgtaggaaaaattgacacatgtgcttgagaggatgagtcagagagcatgtggccaggcctcctccctcttatcacataacccaccttggctaaatataggtgtgtctcaagctgcctggcggatgctacgctccactcaggggtctaccaccagggatcctggacctggggcctcccaaagtatttttcagtccttttgtagtcctcttctttgaaagaggataaatcattttttgttcttttacccaaacaccttgactataaatatgtgtaaattatgtattcatatagataaaggttaaagaaaatacaatcaaaaaacatttgattcatcagtttggcaagatttggagtgttttttgtttttgtttttttaaatttggctttatttattttcagcctggctcaaaaagcgtttgaggtagctgcttacaggaatgcatgcaataagattttttaagataataagttttcgaagtcagcataaggggaaattgttataaaatagaataagaaaatgagtacatgtgtgtgaaagaaagagagagagaaataactgtaagaatacaggagggctagcttaaaattagctggagtagcatcctactgcaacctttaaattttaagagttttggagaatatcttcctttttggcctattcatttccccaaaatccactgttatagatgaattcacacataactgtcatatcacaactgctcattgatacagaatgaaccaaaaaatgtaaaaaaaaaaaaaaaaaagcgcacagatttggtataatcatttaaattcaacttcacccagtgaagataataactagtcggtagttaacatcatcttaaagatgaatgagctgatgtgctagggtgaggttaccattaagaagtagaggacaggcatggtagctcaagcctgtaatctcagcactttgggaggacatggttagaggatcccttgagcccaggagtttgagatcagcctgggcaatatagtgagacctcatcattacaaaaaaatttaaaaattacccaagggtggtggtgcatgcctgtagtctcagccactcaggaagctgaggtgggaggatcacttgagcctgagcggtcgaggttgcagtgaaccaagattgtgccactagcctgggtgacagaataagaccttgtctcagaaaacaacaacaacaacaacaacaacaacaataaaaaggtagaggagacaggcagggatttccaggacaacttctcttactctagttctaaaatcagattctcttttccaaacctgctttttcactccgttttctctggagtcccaaaggaccattgctaaaatgttaagattcaatttcacaactctttttttttttttttttttttttttttgagatggagtctcgctctgtcacccaggctgagcgcagtggtgcgatctcggctcactgcaaactccgcctccggggttcacaccattctcctgcctcagcctcccgagtagctgggactacaggcacccgccaccatgcccagctaattttttgtatttttagtagagacggggtttcaccgtgttagccaggatggtctcgatctcctgacctcatgatctgcccgccttggcctcccaaaatgctgggattgcaggcgtgagccaccgcatccggcccacacctcttttctaaagcacaagaactcctttctgttctcagggttactcacactgtccttttctgtctgcccatgtttctcccctttgtggtatagcaatagcaccctgcacatgacattttctccaagctgggcccttagcataagaaaagctaatctctttgctcttctccaccctttacagttgtaaccatccactgaggttttcattcactggtcccttcccacagcctccctccatcctcaccattctcttgcacacattctaattcaatgttgctcagaatccaactgtggcttccttccacctggaccatgaggtagctgtgacctctaaattgcaattactcttagtgtacacaggcatcctagttactgaaacactgtttattctgtgttcttcattaactgaatccttgaacgtctgtttttccttcctagtgaaattataagcttctgaaggaaactttgtctttagctttattttgtactcctttagcactgatcacagtgctgtacattcagaagcaacaggtttacacagtatgaatttacaatttgtttctctgaaatgatttttgaaaattgatactactttaaaaataatcaaaaggtagcaattcaaatgaaacctgcagcaagtctgtttataaattaataatgacttcttaatttttcattatgaatatatagaagatattaaaatctgatttaaggcaaatacattctgtttaacactataatctattcattaatttgtgtttatcccttattttatatttttgttattgttttggttcttaattttaatgttttggctttcaagagaggaaagcctattttatttacaagaatgttttacgtcagtatgtaaaatacaacttcattgttgcctagaaattttgcctataaaatttgcttgaaataaaatgcttttttgacagttaaagttccatatttaatctttttttaattaaaagctaatcctttcagttcttgctcctaatgattgaagtttgtttctgtcagcaacaatcaacacacatacacacacacacacacacacacacacacacgtacacacaggttttgctaaaatgtgatcctatgcagggcagttctacttggagaagtctgtcttttggcctgaagctatagttaagatggaactccaaaaatgaacttattttaagagtgcacttcctgaatctgaatttagagaaaaatgactcaaaggaatttttgctgccagcatttagtttttaaagtacaataagaattctggcgtgcttgtctaccactgctgtgtcctcataacgttactcaactgcttaatttaatgctttgctttccctacaaaactctggcaagcccctcaataaagcaattaaaatggtctttattctcttagcccagagccaggactgtcaaccaataatttgattccttcctacacagctaaagaaaggtttttttttggcacatttgaaaagcaaaagatagcaccatgcatttgccacaaaccaatctaaattactgaggggaaagaaaaactttctggaaccttaattttgatcctagtagggtcaaaaactataacgaatgagttactggaggaggaagaggaggagggggaggagacagaagagagaaaataaagtgatcaggtatcctcccaaactttgagcttctaaaagtttatcaggctgagagaaaaaaagaaactttaaagttaaattaaatttaaatttttaatttttacatgggacacaaatcttaattgatgaaatgaacgtgattttgtgactaatagtgattggagaacattaattaaaattgattggagaagctatgagatctccttgagaaaccaattggaggcagggaaaaaaaaacctcatgagatgaattcaaaaggatttacttcctgctttcacctctatgggtaagcaatgcagtggtgccttttgaatagtgtgtatgtgttcatttgtgtgtgcacgtgcatgcatttgtgagcatttgtgtttgtgtgttagagcacagyactctttttcactcaaaagtcatgtaggagagcaggacataaaaaggaaaacttgttaaaagggttcagactaggctgtaacataatgaaggtgaaatatggccaaaggacaatgaactgggcctttgaatacttttatttatcccactctccttataacaaagggaataacaaagwcaacaaagattagaggagaagaatggaaagcacaattctgctactagttcaaattctgctactagtttctttctaaaaagaaaacagctaaacagtgcctaattaatagaaaacagaaatgttaaagtgaattcctgacttttcctcctaaatactgtgaaagccctagaaacactcctgggagagagtagttagtatatgcaggaatttgaaagaagtatactttttcatatacggaacacaaggcccagtttaaccatcagcataatatatcaaacttttgctgtaatattgccctggtactcttggccctgaaaataacttcctattgggcttttctggctgatccaatcagaacagagcctctcaagagagaaacaacttttttgctcaaggttcagaaaattcagggaaaatagcaatgtttagaagctgtattttgctgtttgctttcgaaatgaaaggagctttttagagtctcctggaaaaacagctatattataccaaactcaagtacctcctcaactggcgttgcttctaaaatgttgataatatggacatgtgtgagaagcagcaatatgaggaaacagtgtttacaaaggcttcacaacttgccttctcatttaatccttaaaacaattcctcaaggtagatactatcatcatcccagctttacctatagaaaaactgagacagaggaagctgaggtttcagataatagcagatatttcagacagtggcagttcatttcattgcacgtgatatttgctcattgcctatcaatcaggagcggtgcgccatgccaggcagttgaggcctttcatccttcaggcatattayttcatctgatccttgtggccatgccagattagcaaagtgttacctctctttattaacagatgaggggggaaaaaagagcaaatggtaaagtaatttgcccaaggcctcacagctcacaagtgccaatgttgggacccaacctctagttttctgactcttcctcactcagtaataattccactgcaccagtctggttccctctccacctccagcaactctccccacgtagtgaccatcatcacctgcaagtctccttagcttgccaaggccctgtgctaaaggggaatccctccattgctcagcttcacacacaaagaaaatgcttagttttgtttcagtcagtgatgtgtgtgtatgcatatatgtatgcatgtagacttatgtgtgtgtgtttgtgtgtgtgtttgtatctaagcaatcctcacagcaaccctatgagatattaactttcatatgttttacagttgagaagagtgagactgtaaaagaataaatgatttatccattgtcccagcaaactaatagcaaatttgggattcaaaagaaaatttcccaatttttaattctagtgttctttccacaggtgacagcttttccttcctttgtttccttatagtcatatgacattggcagaaattaaaacacctctcttccttatacatgggtaagagatgcatgatgggaattaagtttgcatgacatgtacctcatcagagaaaaaaattataggaaagcatttcctatatagcactaagcaaaggtgattctttaaaacttggccataaccacagccctgcagtgaacaaatctctctgggctgctactgcaaagtatggcatcagagcatggtcattgacttcaaggcgtatacagcaaaatgtgatgccgaaacacaggggactgttgggaaaaaggagataaaaagctaaacctgtcctgggagagaacaaaaatgtttgagctgcaacctgaaagagtagagagtcagagaaatggagaaagcagtaaaaaggatgatccattgagaaatcgagggaaatctgacatgggttgcaggagagcaatgaggacgtaaatgaggccacagaagtaagtagagtccagatcactcaggaccttcaggttcttccaagggccagtgggaaaccgttaaatgatttaagaccatagaaataacaatttaatttgccttttctcaggggacttatgacccaaaggaaagcacttacaggtaaatgctaaagttgcatagaaaaccacagaatgttaatactaggtgaagatttgaaagttttctaatctagtcctttatgttacagacaatgttccaggagaaaaatgacttgcccaaggtcatacacagcaggaaagacagaacatccccacctagtactatttctgccacatcacaccacctcctcctcttctccctgccgtcccaatttcactgtgacagcttcctgctcaaaacagactattgttgaagtggtgaatgtttatgctggtggcttatatttctaagcctgagtcctgtcactttgatgactttacatttaccatggcaaccacagcygcagctggctaagaactttggagtagaagtgatgagtgtgacttaaattttctgaatcagtagccaggtgattttgactgaatgtcatggatagtctaccctagaaagaacaaaacatgaaaatacagtttttatatcactgtaccttcttatcagtgagagggaaagcagccccaacaattctaaggtctgggagaaaagaataaaatcccaggcagagctcttcagctgtgtgctcaattctcctcctgatgttcctgagacatcagtgcttggggagtgaaggcccctgaaggctcacatgaaggcagtagttgaattgcaaatagaagttaagaaaatattctccttgaccttctgttcaaacctgtgaaggctgagacttgacccacatagtacatcttgactgtctcggaataaaatgaaaaattcatagaaatgagagaatgttatcattccctcaatcttatgatttaaaaccttctctatttgataggctacattcaaatcaggttagtggctcagcattcagcacacagaagccaggagggtgggacgcatcactttctgggtctctcgataaatggttgagcacttgatagattcagattaaaggactgcttcagaaaaaggcagtgtgctccctcaaaatgtgtgtatttgcattatgggtaatcgtaggttctcacatgagtttttcagcatgaagctcacaaaatatttttacatccattatctcatcaaatcttcaccactgttctgtgatgaaggcattgtaatcttcatcctaaaagtgaggaaactaaggttctaggggcctaactgacttgcccatggccatagggccaataaatgctagaatgaactaaaaacttagtctcttgtcatctttctcaagtccagagtctttctgtccaccacagtagtatgtcagctaagtgcaggatagtgaaactccccacattagaggccccatttgtttttagaacttggattggctgcagtaatctaagcctagattcccccccaagacaaagagattggattaattttttaagtatagcatgggaccagtagactctaaatacctaatttgtataataaataggcatatagaatataaatgtgatttcttagcctcaaaaaagttacaaacctagaaatatctggcattcaaattagactttagcagcaatttctcctcccatgatataggcagaaattaaggaaaaactgaaataaaggaaacttgcttgaattaggttggtgtaggataacttgaaatggtttttacaacctatgccaactagatgacatagtgtctgcccagaatattctccattctcctcaagcccctaccctattacattagcaagtaacctttcttccagtatgaaagactagagtaagagtttaaaatgctgaaagctttgcgggggtttcccactgttcctttgaacaaaacaagcacactagttttgctagatacccggaaacatgtttaatctgtttagtaatgcaggagaacaggtctctgtaaatgtcagagtgccttgacatgtcagtcaccccaaatcaaggcacaccctgaaactttgtattggaaatctcaggcatctcttttgggtccctctttcccatcctgtaatattgcttttaccaggcactaatatgatctgtaccatataatcttccacagaatttcttcattgtaattctttaaacacatctaagatatatatttgtcaacaattggcagaggtactacttatttgctgggatattagcatctagtggaatctctcatgatctgcccatgtagggtactaatagtgaaattaaggcaccatgacataatcgggggaatagaggattagatatttggtgattagaggtgtcttccccaaatctctcaaatttctgagaatttttcttacctccaattttagactgtctagcactttttagaacttccttctaaaaaggacaaaaactctactaatttaaaatataggaagagtcatttgcatgagcctgcttagttaactcctcctgatacaattccttttgtcactggatgtttctcagaccaaccaaattttaaccataaagcaactctcaggacttcacagccgggcttgttggtttatgccgaatttgtgtaattgatcctttcttttcagaactgatttgatttttttttcagcaccaaataccattaaaaaaaatgtaactgtgaaatgtgaatttctcattaatttatattataaagttagagatgaggaagtcataggctgtagctgttttcttctgtaccctccctttcactcaggctattaaactccccttagctttacttcctctttccctgacccagagcccatgccggaacattcaaccaccttacaccagtcccctcaaacctcactacccattctctttctacctcatgtgctctgatatcccttagactcatattaatccagcaatttgctttatctcttcttacacgcaggctggcaggcactggtggagcaaatcatatattgaaatttcataaaattttggcatctccagtttcaggaaagtgctcactgcccctctgaaatcctagctagctggccagcattctctcccattgcccatagtatctgtccaaaatattctccattctcctcaagcccctagcctattacattaacagataacccttcctccagtatgagctatgaatattttcaacttctcatcccatgtgcataaatatatttgtatacgttaccacctttttgtactttctatctcaaagggaaatatttcttccactatttaagctttaagttccatctcatctccatccattcattcatgcattcaatacatatttatcaaatatttattgtgtaactgtgctggaagcttgtggtactgtagtaagcaaggcagatttgtcctaccctcagaaaattttggatgcagaagataaggaaataagattgatagatgaatgctgtgacagaaacacaataatagagaataataaaagaatagttaattttgagagggtaggccaggtgcagtggctcacgcctgtaaacccagcactttgggaggctgaggcgggtggatcacaaggtcaggagatcgagaccatcctggctaatatggtgaaaccccgtctctactaaaaatacacaaaaattagccaggcgtggtggcaggtgcctgtagtcccagctactcaggaggctgaagtaggagaatggcgtgaacccgggaggcggagcctgcagtgagcagtgatcacgccactccactccagcccagactctgtctcaaaaaaaaaaaaaatgtgaaagcgttgtcagagacggcatctctatgaagggaatatttaagataggaactaaaggaatagaagcagccagctgcgaagacatgggaagggtagcaaaaatgctagaagttaagcaaataacaaaagctggagtgttcttcagggaactgaaagaaggccaaggtggagtgtgtgaggggagagtggaatgacaggcagttggaaagttgagcaggggtcctatacactaaagaatttggatttttttccttttcactttgtcccatagaaattgactgaggattttaaacagaagagtggtgttgatctgacaaactgtggaagtagtgtccctttaggagactccagcaataatcctggagaaagagagtggatgctcaagagctaggggaggcaactgtggaggtataaagatgttatagctgagatatctgttggcaacacacagaatagaagttgatggattgattgtatttatggtcaggaagagggtgaagtctagatgagaatccatatttctgcagcaaggtgggtggcgatgccattatgagggaaatgcagaggagctggttgggttgagtggggtgaagtcaaggtttctgtttcagacacattatgagtgagatgcctgtgagacatgcagagaagatgttcagaaattgtttggatataagttaagtctgcaattcagatgggaaatctgacctgtatataaactatgaagatattatcacacttaaaactgtgagcatgatgggctcatacaatcatatcacacatagaagaaaacaaagccccagacccagctctgagaatcttgtgtttcttaagaggaaaggaaagctaagaaggaaactgaaggtgaaaagccagtgaatgatgggtgaaaactaggagggtgtagtgtctcatgggacaaaaaattaaaaaatagagagtggccaaaggaaactagacttgttaattgcatcaactgccattgtaaggtgggttaatataaagagaccttgcttcattgataatcctatcaattactgatttttttttcaactctcagctctatctgtacctactctgatgctcataaatatgattctgtccatgtctactcaacagaggaagggagaacagggatgacaaattttcctggtatcccacctatctaccctcctatttctttcttttctaggttttctcccaaaattgtccacaaaatactatcctttccctcatttaccttttactccttttttaaataatttcaacattttagattcaggaagtacatgtacaggtttgttacagggtatattgcatgctgctgaggtttaggacacaaatgattctgtcacccaggtactgagcatagtactcaacagttagtttttcaactgttacccctccttccttaccctctctagtagtccccagtgtctatcattgccatctttatgtctatgagtacccaatgcttagctcccacctataagtgagaacacgtgatatttggttttctggtcctgtgttaatttgctaaggataatgtcctccagctgcattcatgttgctgctaaggaaatgattttgttattttttatggcttcataggattccatgatatatatgtatcacattttctttatccaatccaccattgaggggcacctaggttgattacatgtctttgctattgtgaatagtgctgaattgttttggtagaatgacttattttcatttggatatatacctagtaattggattgcttgctcaaatggtagttctgtgttaagttctttgagatacctccaaactgccttctacagtggctaaactaattggtaggaactacattcctaccgacagtatggaagtgtataagcattctcttttctccacagccttgacagcatctgttgtttttttactttttaataactgccattctaactggtatgagatggtgtctcattgttcatttaccttttactttgcagttcattgtgctctagccccaccaattctctcgttgggaaactttagtctcatcactctggtctttaatggtcatcacaagagattctgagaattagaatcttattttggagatgttcccttttttgccttatgaaaaacatttcagagtctaaagtttgtccagttccaaaattgtcctctaattgttggaattgttggtaattatgcaaccaaatagaccaattttttagtacttcttggaaatccctcaatttatattctttcttctttttttctaattatctttattttctaaaatagagtttcaatatgatagttcataatttggtatcaccaattaacactttcgtggacttcaatgtgcaaattcctcaaacttaaaagaagcttcaaatttagggaaaaaaaaacagcatgactaacaattctgtaaattcaaaataaacctacattttgttgagggatagggaagccattttaaattttttatttgaaaacagcatatttcttgcttttttttttttttttttttttttttttgagacagatttttgctcttgttgcccaggctggagtgcaatggcacaatctcagctcaccgcaacctccgcctctggggttcaagcaattctcctacctcagccttccaggtagctgggattacaagtacccgccaccatgccagggtaattttttgtattttttttattatactttaataaatgttaataatatactttaaacctgcccaatgtgcaggtttgatacataggtatacatgtgccatgttggtttgctgcacccatcaactcgtcatttacattaggtatttctcctaatgctatccctcctccagccccccaccccctaaaaggccccagtgtgtgatgttccccaccttgtgtccaagtgttctcattgttcaattcccacctatgagtgaaaacatgtggtgtttggttttctgtccttgtgatagtttgctgagaatgatggttttcagcttcatccatgtacctacaaaggacatgaactcatcatttagggctgcatagtattccatggtgtatatgtgccatgttttcttaatccattctatcattgatggacatttaggttggttccaagtctttacaatcattaatagtgccgcaataaacaaacgtgtacatgtgtctttatagtagcaggatttataatcctttgggtatatacccagtaatgggatcactggtatttctatgggaatggtatttctagttctagatccctgaggaatcgccagactgtcttccacaatggttgaactagtttacagtcccaccaacagtgtaaaagccttcctatttctccacatcctctccagcatctgttgtttcctgactttttaatgatcaccattctaactggtgtgagatggtatctcttgtggttttgatttgcatttctctgatgaccagtgatgatgagtatttcttcatgtgtctgttggctgcataaatgtcttcttttgagaagcgtctgttgatattctttgcccactttttgatggggttgtttgttttttttcttgtacatttgtttgagttctttgtagattctggatattagccctttgtcagatgggtagattgcaaaaattttctcccattctgtaggctgcctgttcactctgatggtagtttcttttgccatgcagaagctctttagtttaattagatcccatttgtctgttttggcttttgttgccattgcttttggtgttttagtcattaagtccttgcccatgcctatgtcctgaatggtattgcctagatttacttctagggtttttacggttttaggtctaacgtttaagtctttaatccatcttgaattaatttttgtataaagtgtaaggaagggatccagtttcagctttctacatatggctagccagttttcccagcaccatttattaaatagggtcctttctccatttcttgtttttgtcaggtttgtcgaagatcagatggttgtagatgtgtggtgttatttctgaggcctctgttctgttccattcgtccatatatctgttttggtaccagtaccatgctgttttggttactgcggccttgtagtatagtttgaagtcaggtagcgtgatgccgccagctttgttcttttcgcttgggattgtcttggcaatgcaggctctttttttggttccatatgaactttaaaggagttttttccaattctgtgaagaaagtcattggtagcttgatagggatggcactgaatctataaattactatgggcagtatggccattttcactatattgattcttcctatccatgagcatggaatattcttcgatttgtttgtgtcctatttcattgagcagtggtttgtatttctccttgaagaggtcctccacatcccttgtaagttggattcctaggtattttattctcattgtggcaattgtgaatcggagttcactaatgatttggctttctgtttgtctgctattcgtgtataggaatgcttgtgatttctgcacattgattttgtatcctgagactttgctgaatttgctggtcagcttaaggagattttgggctgaaacaatggagttttttaaatatacaatcatgtcatctgcaaacagggacaatttgacttcttcttttcctaattgaataccctttatttctttctcttgccagattgccctggccatttcaacactatgttgaataggagtggtgagaggggcaacttgtcttgtgccagttttcaaagggaatgattccagtttttgcccattcagtatgatattaagctgtgggtttgtcataaatagctcttattattttgagatatgttccatcaaagcctagtttattgagagtttttagcatgaagggctgttgaattttgtcaaaggccttttctgcatctattcagataatcatgtggtttttgtcattggttctgtttatgtgacggattacatttattgatttgtgtatgttgaactagcctttcatcccagggatgaaaccaacttgatcatggtggataagctttttgatgtgcctctggattcaatttgccagtattttattgaggattttcacattgatgttcatcagggatattggtctaaaattctctttttttgttgttgtgtttctgccaggttttggtatcaggatgatgctggcctcataaaatgagttagggaggattcctgctttttgtattgattggaatagtttcagaaggaatggtaccagcttctctttgtacctctggtagaattcggctgtgaatccatctggtcctggactttttttgactggtaggttattaattattgcctcaatttcagagcctgttattggtctattcagggatttaacttcttcctggtttagtcttgggagggtatatgtgtccaggaatttatccatttcttctagattttctagtttatttgcatagaggtgtttatagtattctctgatggtagtttgtatttctgtgggatcagtgatgatatcccctttatcattttttattgcatctatttgattcttctctcttttcttattagtcttgttagcggtctatcaattttgttgatcttttcaaaaaactagctcctggattcaytgattttttgaagggttttttgtgtctctatctccttcagttctgctctgatcttagttatttcttgccttctgctagcttttgaatgtgtaagctcttgcttstctagttcttttaatttgtgatgttagggtgtcaattttagatctttcctgctttcttttgtgggcatttagtgctataaatttccctctacacactgctttaaatgtgtcccagagattctggtatgttgtgtctttgttctcgttggtttcaaagaacatctttatttctgccttcatttcgttatttactcagtggtcattcaggagcaggttgttcagtctccatgtagttgtgcagttttgagtaaatttcttaatcctgagttctaatttgattgcactgtgttctgagagacagtttgttgtgatttctgttattttacatttgctgaggaatgctttacttccaattatgtgatcaattttagaataagtgcgatgtggtgctaagaagaatatatattgttgatttggggtggagagttctgtagatgtctattaggtctgcttggtgcagagctgagttcaagtcctggatatccctgttaaccttctgtctcattgatctgtctaatattgacagtggggcattaaagtctcccattattattgtgtgggagtctaagtctctttgtagatctctaaggatttgctttatgaatctgggtgctcctgtattgggtgcatatatatttaggatagttagctcttcttgttcaactgatccctttaccattatgtaatggccttctttgtctcttttgatctttgttggtttgaagtctgttttatcagagactaagattgcaacccctgttctttttttgctttccatttgcctggtagatcctcctccatccctttattttgagcctatgtgtgtctctgcacatgagatgggtctcctgaatacagcacactgatgcgtcttgactgtttatccaatttgccagactgtgtcttttaattagggcatttagcccatttacatttaagattgatattgttatgtttgaatttgatcctttcattatgatgttagctggttagtttgcccattaattgatgcagtttcttcatagcatcgatggtctttacaatttggtctgtttttgcagtggctggtaccagttgtttctttccatgtttagtgcttccttcaggagctcttgtaaggcaggcctggtggtgacaaaatctctcagcatttgcttgtctataaaggattttatttttccttcactcatgaagcttagtttggctggatatgaaattctgggttgaaagttcttttctttaagaatgttgaattttggccctcactctcgtctggcttgtagagtttctgccgagagatccaccattagtctgatcggcttccctttgtgggtaagccaacctttctatctggctgtccttaacatttttcccttcatttcaactttggtgaatctgaaaattatgtgtcttggagttgctcttctcmtggagtatctytgtggtgttctctgtatttcctgaatttgaatgttggctaggttggggacattctcctggataatatcctgaagtgtgttttccaacttggttccattctccccatcactttcaggtacactaatcaaacatagatttggtcttttcacatagtcccatatttcttggaggctttgttcatttctttttcctctttttcctctaaacttgtcttctcaccccatttcattaatttgatcttcaatcactgataccctttcttccacttgattaaatcggctattgaagcttgtgcatgcatcacgaagttctcttgccatggttttcagctccatcaggycatttcaggtcttctctacactgtttattctagttagccattcgtctagtgttttttcaaggtttttagcttccttttgatgggtttaaacatgctcctttagctcagagaagtttgttattaccgaccttctgaagcctacttctatcaatttgtcaaagtcattctccatccagctttgttccatcgctggctaggagctgcaatcctttggaggagaagaggtgctctggtttttaggattttcagcttttctgccctggtttctccccatctttgtggttttatctacctttggtctttgatgctggtgacctacagatggggttttgatgtagatgtcctttttgttgatgttgatgctattcctttctgtttgttagttttccttctaacagtcaggaccctcagctgcagatctgttggagtttgctggaggtccactccagaccctgtttacctgggtatcaccagtggaggctgcagaacagcaaatattgctgcctgatccttcctctgcctgaagcttcgtcccagaggggcacccgcctatatgaggtgtctgtcagcccctactgggaggtgtctcccagttaggctacacaggggtcagggacccacttgaggaggcagtctgtccattctcagagctcaaacgccgtgctgggagaaccactgctcttttcagagcggtcagacagggacatttaaatctgcagaagttgtctgctgccttttgttcagctatgccctactcacagaggtggagtctacagaggcagtaggccttgctgagctgcggtgggctccacccagtttgagctgctttgtttacctactcaagcctcagcaatggtggacgtccctccccgagccaggctgccgcctcccagtttgatctcagactgctgtgctagcagtgagcaaggttccatgggtgtgggacctgccaagccaggcacaggaaagaatctctgggtctgccagttgctgagactgtgggaaaagcacagtatttgggcagaagtgtcccattttttcaggtgcaatctgtcacagcttcccttggctaagaaagggaaatccccagaccttttgcgcttcctgggtgaggtgatgccccaacctgctttggctcaccctctgtgggctgcacccactgtccaaccactctcaatgagatgaaccaggtacctcagttggaaatgcagaaataacccgtcttctgtgtcaatcacgctgggagctgcagatcggagctgttcctatttggccatcttggaacagacctcaattttttgtattttttagtagagatggggtttctccatgttcgtcaggctggtctcgaactcctgacctcagatgatccacccaccttggcctcccaaagcactggcattacaggcatgagctacctcacccagcctatttcttgccttaactcattaagcccttgtgtcaggctaaaagacatggttctccaaaaatatatttacttcctaattctcagaacctgtgattattacctcacctggaaaaacagtgaatattaccttctgaagcaagagatgtgatgaaggatcttgagaggagacatttaccctgaattacccagataagccccaaatgccctaaatcacatgtatccttataaaagagagccaggcagaggtttcacccagagagacacagaggagaaagtgatgtgaagacagagagagagatttgagtgattcaacaagtcaaagactgccagcagaagctgaaagaggcaaggaacagaatgtcccctacaacatatggagggactgaggtcctaytgacatcttggttttagaattctggaccccagaaatgtgacagaatatgttaccaagtttgtggtaatttgtcatggcagtcagaagaaactaatataaattttggtatcaaggagtgaggtgctgctataacaagtacccaaaaatacagaagtatcatccaaggaatagccaagtgatatggtttggatgtttgtccccttcaaatctcatgttgaaatgtgacctccaatgttggaggtgagacttggtgggaggtactggatcacggaggcagatctataatggatgacttagtgccatccccttggtgatatgtgtgttctccctcagttcatataagatttggttggttaaaagtgtcagagacctcaccttactgtctcttgcttgctctgtcatgtaacatgcctgctcccacttygtcttctgccatgggtaaaagctccctgaggcctcaccaagagctgagcagatggcagagccatgcttcctgtacagcctgcagaaccgtgagccaattaaacctcttttctttacaaattagctagtctcaggtatttctttctttctttctttcttttagatgaagtctcactctgtcacccaggctggagtacagcagtgcgatctcagctcactgcacactacaacctccacctccagggttcaagcgattctccctgcctcagcctcccaagtagctgggattacaggcacccgcaacgatgcccagctaatttttgtattttcagtacagactggatttcaccatgttggccaggctggtcttgaactcctgacctcaagtgatccacccaccccggcctcccagagtgctgggattacaggtgcccagccaggtggatttctttgtagcaacacaaaaatggcctaatacaccaaggaattcgctaataggtagaggccggaagaattctgtgaagcatcatagaaaaagcctagaatgccctgaagtcactgttggtagcaatatgaatatcaaggatgctgttggtgagggctcagaaggaagtgagcggcacagtagagaaagctcctatcaaattgcgccatggcattcccgcctgggtgacagagcaagactctatttcagaaaaaaagaaagaaagaaagaaagcttctatcaatcatctttgaaaatatgtatgctatcttgagcagaatgttggcaaaaatatgagcattgtaagtacttctggtgcaggcttagaaggaaatatagagcacatgattgagaaatggaagaaaatgatccgtgttacatagtggcagtgagcttggcttaactgtgtcctatagtcatgtgaaaattagcagaacttgccaatgatgaaatcggatatttagctgaggagagtaccaagcaaaatgttgaaggtgcatactgatatcttctttctgttcagagtacaaatgtgagagaaaatagatacattcaggaaggaactgttaagcagaattttcagtaatttgttatggtggccaaagtaaactgataaagctcttaagtgaagagaggaatatcttctcatattattcagaagtgctaatgcatggatccttagtgtagactaatattagtttagacagtctgatattttaagttagcattagatacctgatcactacatgaagatagtgaatcaaaatgtgttattttaattctctgtcacttgaacatttaggacatgctcctatcagctgtcaatttattttttttaatattagcctcaaataataagaataaattaactttatcttgagctcaagttcttaaactcaccaatcaatgatttgtgagtcattcttttgtttgttggtgggttggtttctttgtgttttcttttatttgtttgtattttaagacatggattcttgggccctcagcaaaccttgtaaattgattttctggggctgaggattggatatttatgtttttctaaggctttgtcaattattatgataaacaaccatctaggaaaccattgaaattatgaagcacagctggatttgtctaccatttcttaagtaccccctatgtgtcagatatatattagatgagttttacataatgtttatatgtaatcttataggtacatgtttaatttcagctttgtagttggcaaattgaggttcaaagaagtagtaaagctgttccaaatcagtaattagaaaaactgatatttgagcacatatctatttccaaagcccattctacaaaaaaaaccagcagtaaagtaaaaacattatttgttcatatttccttatatatcctatctaggtggatgatgtgggtaagtcatttaacttcccaagatttgaagaagtgtataataatatgtatctcaagcagttgttatgaagactgaattcaattatgtacagaatagcactttggcaacactagagtgtcatgcaaatgtgatttgctttactatcgtttttgctcttacctatttcttatttatggaataagtaaagtataaccatgttatttggcagaagtgccagctctcacaaaatgtcgcatctactgccagctgcttctattcttgtggatctaaggcttcctcaatggttacttttggagccagactggatcagtgttcgagtcccagctctgccatttactaactgcagaatcatggactagtctttccatgattttgattattcaccaataaaaagggaaagagatgctggtaatttgaggtcgacattgaaataatatagaatgcttataatatttatgatcatcattaattatcacattactgacagtagctgtgttagtaagatggcaaatacattttgtgaggttccactgggcactgcttatgaagagtggcacaggcagggggtgaaagaatgccagcagtgaggcagtgtattctgcagggcatgggaaaaaacccaggccagttgcaacccacctgaatactaactcccactgtagcctggattgcattcctatgccagcaaaatggtttttcaactgtggctattctgtagcagagtatcagcaaggaagccccggatacggaagctaaaaagagtttaattatttggcacatatatattatgccataagtacatacacaagcagaatgggagaaaagaataaatcccatggcagttggcagacagccagttggaaaggcaatcataaaccacttgggaacattaaataagtcagaatgctatcttctagcatataatctagtaatgatagcaataactaccatttcataaattcctgtgccaggaaccctgctaggctttgtatgtacattatcactaggctacaaaactctattgaataagaaccatttattayctcattctgcagatgaggaaactgaggcacagagaagttaaagaaggcattaatggttaaagacctgagaaatattggccatgagatttgaaatagagtctaactacctgtaaaccctgtcctttccactgcagtgtgatgtctgcatgggacattctcatgtcttgcatttctagtccttttataacaaccacggttacgggtaattcttctgcttttttattttgcatgtacccctccccaaaaaaaggcacatgataaataataaaatcatcattggtatatataaatagatgatagatagaccagacagatcgatgacagattaagtgtgtgtgtatatgcacaccatygcactctgtgacttttaaaactatcttgtggatctccttagcacatctcttgtgctctgcttatattctggcccagatgtgcagagcasctagttcacaataacctcccaaccaccagtgtcatcatgtgctttgtggatgaagtgtggtccactctcctgagatctgttcacagtgtcatcaatcgctctcctccacacctcatcaaggagattctgctggtagatgacttcagcaccaaaggtaagaaaaccactcaggctatctcttgaaatttcaaagtttggcagaagcaaagtttagtagcagtttggatggcaaaattataggataatttgatgaagcataaacatygtacaaaygctttgttttacktggagcctcagagacataagtctaagcatctatggacgttaaaagtcatctggagctctgttcagttagttgtctcagttgtaactctgctacsatgttggaatgatctaactatggctccttggagatgggcacttagaagtagtggagtttagatgtcctctacaattgcacaaatcccttttaatkgaatcacaattaacgggaggccttgcctactggtaataactagagttacagttagactctatggaaggcaaagaaattaagatcttatggcttcttccttgagagcaaggcatatgatgtgttcagttaagtgttaagaagacaaattgccaataggacaagagagatgaggtgattccaacaaagttcaaaaccagaatccaccatagcctttatgttcatttttgcttattacagtgaagaatctcactctttgggttgtcaaataacctgtgtatgtaggtggtctgacagccacattacaaattcccaaatggaacccatttttcagaaaagtttagaaaatagcaaagacttggcaatgctaatggaacagcttacccttgagctgtgaccacagcaacatgggaagtttctttagcttcagagtttctgccataatcacactgagctcaagaagctgtgggatgayagagaaaaactggctgaaaaacataaaatgtggccttggaagcataaacaggaatagtacccaattagtaagtagataggagtccctttatgaggggcaggtccagattctgtgggacctgaagcttattcagttttcagggtcctgtctaagaaaaactttcttagaaagttttctggaagccattccaacctaggatagctgtcaatagcttgattacacacagaaatgactgtaagtcacataaacatagctcataaagcccccggaaaactgttcctttagctggatccctccatggccatctaataagagagaaaaggtgtaatggaaggggatgtcagagtagagaatgaaagggtcttatttgcacacattgtttagcctcttccttgggtcatggaaggggcttttgcaagaggtggggctgagagtagaggcagaattgtgcagaagcctgagctacatatattttaaggcaaatctgcccccaccttgacaaatactcagaaaggtgtgccctccactacatcaccttacaacactgaaaacaaacatttggggtttgaaaaatcagacagctttgaatactgaaaccagatagaatccttccaagaaaatgacatcagaaaataaaattatgacccaaggaataaaattcagtgatgatggtaatgtcatagtttttggcatttgactttggggagcacttctgatactatccggacttacttaattcaagtatttcctggtttatctttactctgatgtagactatctaaaagataatttggataaatacatgtcccagtttccaaaagttcggattcttcgcctcaaagagagacatggcttaataagggccaggctggcaggagcacagaatgcaacaggtaagaagttactcatttttttgtttgttacatttttattttaatttaaaatgtttctcaaacatacagcaaatgtgaaagaccagcacaatgatgcctatatatgcatcacttagttccatcaattttaaacagtttttataatatgtgctttatcataaacacacatagacacctattgtatatacttttttcctgaacctttgaaaaagaagttacagacatcatcatactgcacccctaagtacttcagtgggcagctctgaagaacagaagcattctcttaaataagcacagctttcataactaaatataatacctactatatgctcttttcaagttttctcattgttcccaaaatgtttttgtttttgtttttgtttttttgagacagagtctcgctctgtcacccaggctggagtgcactggtgccatctcagctcaccacaacctccgcctccctcgttcacaccgttctcctgcctcagcctcccaagtagctgggattacaggcacccaccaccatgcccggctaattttttgtatttttaatagagacggggtttcactgtgttagccaggatggtctcgactcctgaactcgtgatccgcccgcctcggcctcccaaagtgctgggattacaggcctcaaaatgtttttttaaattcgggaactaattaagtttcatactctgcatttgatactttggtcttcttagtctgaaaagtcaactcctcacacactttgtttaaataccagtgtgtgtgtgtgtgtgtgtgtgtgtgtgtgtgtgtgtgtgtgtattttaagttcatgccatttgtttggtaccagtgaccatgttctgaaatttttgatttcctcttgttacctgcaggataaatgtttttggagtgaaaatattatatagaatgctactacataggtgatagaaatggtatacatctcatcaagaggcatataatataacataatatcaccagtattgttgatactaactttgttagttaagatgttgacagctaaacctttactttgggattaaraagtaatttgtggaatgacacattgatccatgaaaatattctgtttttcttacaatgttttacccaatggtttttagtatccattgatcatccttgcttaaatcaattattacactgaggactgamaatttgcttttctataattcattcttttttatttagctggcattcatgtgtaaggagaaaatctctatctctccctctcctgctttctaactcttcctccctttcccctcaatctccctctcccctccctctcatcccctcatcgatatggatttatggctcagaaattaaatgtgtattatatcaccattattcttgttggtgttcaaattgtcccaaatttgaccactaggagcttcttcaagcctgtgcccttttgacctgacccatcaatatttcaagatttcgtaatgttttaattctataatcctcacccctctcttctctgacccatgtctattcttcctatggttctttctgccttccccaaaggccatatgccttcttttcctctcccctttttagtgtgcaggtgttggtgagtgaatgagaagtgaatctattttatgagtattctaaaaacaacatcaaacatttgggttcatgttcatacatttctatggaaggatctgtgccctgtaatactagctgatttatatgctaggtgccattctgaatactttgtgtattaactgattgaatcctcacaataactctatgagatgagtacaatcacatcctcattctacatatgagaatatagaggcacagtgaggctgtgccttatgcaagctcccccatctagccagtggtaaatccaaagctggcacctgaatgccctgaccccagagtccgtcctcttatcaactacaccttgaggcctctagacatttagccaccactctggccctgtaagccctgcttttacaggtctccaccagcttaaattcaagcatgttctgatgggaagttttctgcttacctgagtttaattttctcataactggaccccatatttgaagctcttctcatttcattggtttgctaacaaatgtcttctctttgtagaggaaattttaagtragcaacaaatacatcacaccaaaattggcattgcagtgacagttaagattcttgatgagagactgcattcagaaaaatttaatggcattccatgcttaatttcctttggaaagtaattatctataaatgatgtaaaaataggatactcaagaactagtttaaataggtaatttttgagctgaggtctgggtgaagaatattcccaagcaaatggaacaagaagtacaaatgtcctaatgaagaaatgagcttggcatattcaaggtaaagaaataagttcattttgactcatgggtgctgaccatggggagagtcataaaagattcatttggggagaaagaaaaaagcaaatttttctaaagttttgtgcatcacttaaagattgtaggcattattctcagtataaggtgaagccaatgaagaatattaaataggaacgaaactgtctgatgtacattttsaaagctcattctggccactgtgtagagaatggatattaggaagatgaaaaaggaagtagggaggccagttaggaggctactatagttgtccaagtaccagggaggtgccagggtaaatgggagaaatggtcagcttcatcatagattgtgcacatggaacgtataggacttgccgtcagataagatgtgaagagartaagaatgacaccaatcagaaacaaaccctaggactggtatctgaacaacttggtgggtggtaggctcaaaactggaggagcaggtttggaattgcagttgagttttgattttgtccatataaatttgagatgaaaatgagatattcatgcacagaaagtagaatacagaaccaaatatgggttacttatttaaaaattttctctctgcctgcacggagcacagagtatgctagtaacggcctccaacacagtccaaactattagacaacatgggtggagtgtcttagaaggggtgttatgagcttgattaaagcagttgcaactgcttgctcaagtgcttgcagttaacatccataatgtaatttatttgaatttagcaaatctgaatgtaaattcagattcattaacagccttgagaatattagctcagtaactgtcaaaccattttgacaatggcttgtgtagaaataaatgtttcatcacaactcagtacatgtgtaatcacacatataactacagtagacattttatcaaataacatgtggaatagattctaataccttcttttctatgttatttatgttttagatcctagccaatctcaataaattgatttagtgattgattcactaagggaatctacagctctcagtttgaaaaaccccagctaggtgtatcttaattgcttgccactgcctagtagagtgatgcttcccaaactatctgaaaaggaatttttttcccctaatttccaattttttattgacctacccctttgtaaattataatcaatattaattacccaaaaaggaaagtagatatataaaacacaaacccatttttattacatacaaaatatatatggctgggtggtggctcactcctgtaatcccaacactttgggaggccaaggcaggcagatcacctgaagtcaggagttcgagaccagcctgcccaacatggcaaaaccctgtctctactaaaaatacaaaaaaattagctgggagtggtggcaggtgcctgtaatcccagctactcaggaggctgaggcagagaatctcttgaacccgggaggcggaggttgcagtgagccaagatcacaccactgcactccagcctgggcaacaagagcaaaattctgtctcaaaaaaaaaaaatgtatatatatatatatatacacatacacaaacacatatatacatatatatgcatatgtatctacatgtatataaaaacagtacataaataataaatttataaatttgacaaattgctataaagtttcaaaatatttgttctcaatttctattgctatcaccctgtagacagcagggtctgtggcctacacttggagcagcattagtggagcttgggtgcctgagagtttggaaagaagaaaggtttgtctcgatgtatccttgcccaaggatacatccaatgctgggaagtacacctgtcccctgtggggaattcaaggcaatgcaggatcagttttagcagagaatgtaattcagagactggcattgagcagagatggcaggcgtggtgggtcctctcaaactcccctgggtgtgccacagctctcaagagtagagataagtaagagactaagggcctcctgaagagttcctgtaaattagagatcagcaaagacagcagacaaaaattttctctaggatgcctcgccaaacaaggagtttaaagataagaatctgagtccagaatctgacaggscttgatgctactgttccctaaaatttgccctttaggactcaaagaaaagggaagtaacaggcaagggtgagatccagagatccaaagacatgcagaaatagaagtcagatggcctattttggtcccagggtattakgaggctctctgaagttctgcaagaggctctctgaaagtctgcaatcatctacaaaataataaggggccaagcagtgatcggccttaccattagcaatgtctactatgcattcagtttccagggcatgttagttcttcatctgaatctaattcaggcaaaaagattaggtccaatcagttgcttgctgtgaatgaggaggttgagaggcccaagtaggattttaaaattgacaggtaggccggggcaatggatctctaagaattgcycactatatgaagccaacagaattaaaaagatagagtaaatgagatatcagggaagaagtagatcacccatatcccttcctagtatggaacagaccaagtgatttactgccctgccaagaggagttacagtcaggcagtagagagtcaaagtaaatattaggttttcatttccttcatgacatggcatttggcaaaattcctgacatttctatgagcattctaaataatcacttggctaactttaagtaactggacaagtgacatctaactcctagcaaactccaaggtctcctaaaaagcaacagtagacatctgtctgcaaacttttataacttgtatctgctgcaggtaaaaattttttccttagcattacttaggaggcattatgtaaaattaaacggcacgccaagccaacatccctcaaggaatcctagacataaccatctagcattaactggtacagcagcaatattccaggctggtacactggatataagtgggggtccatgctcaacaaggacccaaaatttttggcacattgaacagttttatgttaccacccaccccccccccagatttttaagttacaaatgaaacccatctgtaaacaatccagtattattgggacctatccttagaaaacagaaaatcctaacaggtagcaatcaaggttggactaaaattttatattctttaacccgcctctccctatatcccctctctcctaccctttccaaatctagtgctctgtagcactatagggtcactatagttaacaatagtttattatatattttcaagtagctatcagagaggattttgaatgttcccaatacagataaatgataaatgtttgaggtgattgatatgctaattaccctgatttgatcactacacactttatgtatcaaatatcactatgtaccccataaatatatacaattattatgtgtcatttaaaaattttaagtgattgggttgattattctgacagtaaattatactagcaatttttaaagaatttagatatcaggtagctcttagaaatatcttcatagggcaaagctcaaaaaagttaagtaacttatctaacctggctaggaaaagcagagctcggattgaaggctgttgtatgtaactttaatgctatgcttatttcactgtgcctctcccctctctgaatcaggaacagtgcgtacaatgtccatagacaataaccacgccaatcagaaatcccaccaagagtcagctacgcagagagctccctgttttctcacctaacatagtcctaggatcttattttaaaacaaagtgtctgaaagtagagcaatagcatgcatgcacaggaggattctcctcttccccaaaataaaacaatataaaattccagactatgttttgagcagatgctgcttcccttaggtcctggcagcaaatgaatgagaattttcatagggatctgggccaggtgggaagtgaatgcaggtttggggacccatcctgctgccactggggactgagaaagataatccaggcccctttgacttcataaggctgctatggggatagggacaggtggcgtagtaaagaatgctctttaaactctaggtctgaatggaccacaagtagaaatcgtattattattttttttttttgagacacagtcttgctgtgtcaccaggctggagtgcagtgccgtgatctctgctcactgcaacctccgcctcctgggttcaagtgattctcctgcctaggcctcctgaatagctggggctacaggcacacacacacgcccggttgagttttgtatttttagtagagatggggtttcaccatgttggccaggatggccttgatctctcagcctcatgatcctaccacctcagcctcccaaagtgctgagattataggcgtgagccaccacacccggccaggaatctttttctactacattgtataccactagccaagtggactttagcaggccacgcttcatacacctacatgactctgtgagtcttcccatgacaggggagacagctgtcccaaaggtgccatccccaaaggacacccttaggagatggcttagtccttttgggctgctataacaaaatgccttagactagatcatttataaatagcatatatttattgatcacagttttggaggctgggaagtccaagatcaaggcactagcagattcggtgtctagtgacagctcactgtctgcttcaaaggcggcaccttgttactgtgaccttacatggtggaagggcaaaaggagctcacaaacactctccagcctctttcatatgagcactaatcctacttaagaagactccaccctcatgatcttatcacaaaggccccacctcctaatactgtcatcttagrgttaggtttcaaaatatgaattttggattgacacgtacrttcagaccatgcaggggacaataccctgtcrttgtcaaacaagcattaatgccctgaaaataggacccttccagcctggtcaggagatgaaactgctatctccaagaacagaagactacatggagcgggtttgcttctcacagatggtttcactaaacagaatcctcaagaacactccacaccaataccttgccctcatgcaaaaatgccattgttaaccaagtaattaatacgatgctaaattctattaattgagaggtagtttgcagatttcagtgataatgatctgtcatctagataactatcctcatcttgttctctaagccttctcatacycaaagctctgcctccttctagcattttttaaagaatgtaatctatggaatgagctacttattttctaatatcacattgctgtttgttagctgygcaaccatagaaaagttacctagggtctttgttctttagtttccttgtctcttaagtgggaataaaaattagttctatactgcagggttgttgtaaagactacataaaacatgcatgaagaatgtttagaacagagactggcatagaacaagcacttagatgatggttgctcttacaggtatgtcaagagctgagctgagcacccaggtatcaaagtagtcaattaaaatgataaaccaaaatgaaagcagtagtcaagccttaatcccttactgcaacagtatcaacaggaggctgaacaggagaaggcactggctcctcctatgttccatttttccccctggaatgttgctgagtgatggatcagagcagaacagagcagacaagaggggcatctcactgcctgcccaaggaacccagcacaaaaggctccttctgttatgtggccctgggatccagagtaagaaagcgaaaggctaggagtgggaaagcactgaatagtgagtcagagtcgagcaaagtgtcttcaagacccattccatctccaataaagtggtcctggcagaggttttggcctgaatggaggcacctgagttaggaatgcagacaggcagaagagcaagtgctgcagccgagtggagggtctgagacctggaccgcaactccctttagagacttcaacacactggctgggcaccaagtctgagtgagaaagcaggtttcccccatgagccccagtaggtagagcctttgtattacctgtggttgggcctgaaagatcacacataggatgtggaccaggagcttatttcctgggttgttacactctctcacacacacatcacatcacccacacacacacacacacacacacacacacacacacttcacttgtataagatcctctggagcaatgtagatgctactgaggtttcaatggagagagagagagagagtgttacttcacacaactaacagggaaataaaagagttcttaatactatttctggcctccaagtttcttttcctttttttttttcctcctctaagtctttttaaaaattgtataaaatacatagaatataaaaatgtaccatcttaaccatttttaagtgtgcaggcccatagtgttacatacgttcacattggtgtgcaatctccacaactctttttaccttgcaaaaataaaactccatacccattaatcagtaacctcccattccccactcctgtctcctataactcttttcattacctcctagcctcgctggtttgtccactttaatttctttcatccctattgtgtgaagtaatttttcctcttcatcattcctaaggccaaacttgtcatctcagtctgtctgcttcttaaaaacaaagtcccaaatcctgcacccccagagttaatgggcacactctctcagaggggacttcagcaactacatttaataccaagtattcttttcagattcttttgcccattctaaatggcttatcaattttttccaaacataaattatgtttgcaccacaggactcctaggagcaaagtttctctcatttcagtatgaaatgaaattatagtgaccacgaattcagaaaaaaaaaaaaggtcactgcatttatagccacatttctggagcaatcatcaatacctttgaacatgaagtacacacattcaatatatcgtattttctaagttttttgtgtgtgtttggccctctaggtgatgtgttgacatttttagattctcatgtggaatgtaacgttggttggttggaacctcttctggaaagagtttatttaagtagaaagaaagtggcctgtccagtaatcgaagtcatcaatgataaggatatgaggtaatatttacacattccacaagatactttcaagcacatctttaatcacaagcagcagaaagtgctgagtatatgcctaatatgtgtgttttttcaaaatccaagacatatacagtttatctacttaaataaatggaaaaacatggtcgatatcttgggatcagagtctgctgatgcaataatctatctggtcactacaaattcttaactctaaataccaataaatcctaatactcatgacctagtttttcccctttatatttagctgaaccccaaatatttatttacctcaaatttagttcttatttctgtgggaagcgtatatgtgcttttaagttgctcttgtattttttttcttcaaaactggctagcatattgttattataaaagtataagttaagcacaaataagccaatcagttactaatgcaaattgtacttgtaaacattcttgaactattattaaaaggtggtgatctaaactcatcaaaagcacttgtttcattcatttgattacatcgtgaagccaaatcgataaagtatataaagatgtatataatcccagataacactttgtttttcatttcctggattagttacatgacagtggataactttcaaagaggcatctttgtgtggcccatgaactttggttggagaacaattcctccagatgtcattgcaaaaaacagaattaaagaaactgatacaataaggtaagtgtgggaaatttaagactagaaagcagtcatgtatctttttgtaaaagcattaaaaaattctacaaaacagctgtatcttgttattctatagaacattaagaatcacagttctagccaatagattaccaaagcaaacacagtgttcttgagaaattcgttcccaaaactcattcttcactggtcatttgtaccctactcaggcctgaacacagaaaaattcactaatgctatcctgtcccctaggatttgcaacctaagaaacacaaactagcaaaatgtgctgcatacatactatacaaacacatgtaatattaaagtaaacataagtgcaaattaaaagtaaataatggtaatagaaatatcattctaatgatagcaatggttaggattttcttttacagcctaatcctaccccctccatgagaaaagtgccaaattctatgaataaatttaaaaattgattcagaagctggatatgaattcaagtttgggcttttatttccaagaaactgcattgaagaacacagcttagacttgaagctgaagtggaggcttcctattacttcttcagaatataagcctgcagcacaagcattaagccagccacaggaagagctgcagggggcttaaactttccctgttgwagtgaccacttaaacagacacaagtaagccagccccaacagaaagccaagcccagaccgtgcaccgaagcgtgttttccccaaacttacccctcaatcagtcatacccgccttccttgccaggtgtgatgccttcagaattattccaccaagcaaagaagtgaaggttctaccatttattgagcactctgtgccaggcacctaactctcttcctaactctaggagggaggtggaagaattcaccttaaagagatggggaaatttagacttaaaagcattaagtaattttcccaggaatacgcagctaatcaaagaagaatttgagactcaaacccagaattacctggatttaacactcttattctgaacctacacctaaagaacctctgctctttccatactctcatgttgagggccaatgtagtggttgagttcagactatattcaacataatgttaggacgagaatgcgttctggatagtctagtaggaaaattggagagcagaaagaaaatgaacataaatggtggcggaggggagagaggtgtgggacaggaattatctcccccttgagatcactgtataccctaagcacaaagcaggctctccacagaaactactttagctggctgagtggtgaccaccataggaagtgattccagtcttggctaactgctgactaaaatgtagtttctatcctccatgatcaatattattagtgaaggttctggagacagtttgaatctcaactgtaccactgagaagtggtatgagcttgaaaaggttacttatcatcttgagcctctgtttttttatttttacataaagactcataaaagtagctgctacttcgattgttttaagaactgaatcagataacatataaagtgctttgaaaggtgcttgccatataacacgctgtcagtaaagtttgtgtgtggttgtgaggcaggagaatagggtctggaggcaagaagcttaaggccaattcatgccgacttcctaaagctgaatcaaggaaaaacaccaaggtctgggggcagggaatctaaggccaattcctgctgacttcccaaacctggatcaaaaggaaaacacctgggtctaggggcaggggatctaaggccgattaacacccacttcctaaagctaaaccagaaggaaaaccccatttccccacacccgagtaacaaaggatcaacggctactctccctacagccctccccttccaccacatctcagaaggaaagggagagtctctgccttggactggccaagcagggaccttcccttcatctgcacagggcgccaattcaccgcagcctttcattagccaaccaaatcctccattcagataaggggcagctggtagggacctcgaaaggagtacttgaaacccagaaaacttggtaacccggcccttgaaccgtttgctccggcccactcccaccctgtggagcgctttcccgctttaacgaatccctgcttgtgccgcttcgttcatgtgtttcgttcctttgttagtgtgttttgttcaactctttgttcaaaatacccagaacctggacaactcacactcacggccttccttccagtaacggctgagaggcagtacagtggagtgagtggcacagcgtcccctcagactgcccagagcaaacccaaggtgtctactgtccttgggaaagtttcttaccttctccgtgttgccaattcctgagcgcttgcttggaggttctagtagagagcgcagctactcatatacccttgacggaagaccggaagaccggaagaccagaagaccggaagaccggccctcctctatcagggatggtcgtcctcttccacagagcgcgcagctttcgggagggacgcacatggagcggtgagggaggaaggagacagccgcctagccagctagatcagccgaatcaaccctggcaatcaatgggctgacagatgttgcagccagatcgccctcacatccagtgttgcagattcttaataattgcacacacaagattttttgtgaagtctgggctggaatatatatataatacttacaatagtgcctgatactcccttagccctgaataagtgttaaaaataacattcctggacagtttgtgtcacagtataaaggacaaataatactagttccaggatgcatctttgctgaacctaatctagctctgccaccatgatccagggatcgcatcacttaagccctatttgtgactccatcccagggcttccctgcatcaggtagctattctgaaaagcctcctacctcccgtacagatgtacagaggaacaactctaaaagtcgagctttcatgagatgcaagtttaaaaaacaaacttttctttttgtaggtgccctgtcatggctggtggattgttttctattgacaaaagttacttttttgaacttggaacatacgaccctggccttgatgtttggggtggggaaaatatggagctctcattcaaggtattaccaggtgtttcccaacttttctttacgataatgagttaatcaattttaaatggtttgattttactaccataatcaggtatgtgactgccactgagaggaaatttcacagaaattttagggtctctggattaattttttcatatctcagattgaatttggaagaatcaattgctgtcataaaatttattagcattccctaatatttcacaacaccatttctgcttataaatatgggggaaatgactttctgccactcagagtaaatgctgtgggagtcatacgtgctacaaaataactctcctggaacatctgtctagaatgttggaaggaatagactcaatctgtaatggatcatcttagagaacacaaatgacagaagtacattaaaatacctctaaagcaggtcaccaacaggtcaggtgtgccttatagtacagctcctttgggcactttatacaatctattatacaatcattgattaacttctgagaaagccttggcaacagcagtagtagagagtgtccaaaaagtaattgctttcctattgggtgggtgttctgtatgtatgtaaaagggtgtaattttggagctgctgatcatgaaggatggttttgagttgtgttccacaagccttttggttcttcccaaaaatgagagtagaggaacgtgaacaaatggacatctatacttctttccctgattcaatcaaaacaagaactcatgttttacaaaatgggattctgtgaagatttatttacaaattaaaaaaaacttacattgaaagttaggaaagaaaaaattacattttactaatcctaaaatgatccacagcaatacacaaaattaaataagcctgttgagtttgattttctattgcaaaagtgtttttgaagttgagtattacttcaggtagggggaaacaaggtggtttcttgtcattgttaagtgccgatgatttgtggataatcatttgataattgatgcttatcatcaaattcttccaggtgtggatgtgtggtggtgaaattgagatcattccctgctcccgagtgggccatatattcagaaatgacaatccatattccttccccaaagaccggatgaagacagtggagcggaacttggtgcgggttgccgaggtctggctggatgagtataaggagctgttctatggccayggagaccacctcatcgaccaagggctagatgttggcaacctcacccagcaaagggagctgcgaaagaaactgaagtgcaaaagtttcaaatggtacttrgagaatgtctttcctgacttaagggctcccattgtgagagctagtggtgtggtaagttcaagtggcaatttaaaatcttactccataaaaacaaaacacaaaatctctttcaaaaatgtgtggaaagaatgagtaattacattataaataaacaccaagtatgagcaaagatgggacaaagcatggctgagaattaaatataggtaaacttgaggaaggctaccaagtggtcatgttcattgattaactcaacagatatctattgagtatccgtagatctgggastatttcagacttggattacagggtgatgaatgaagtagacttggttccytccttgtggagcttaatttgggtagagaagaaagattataaacaaataagcaagtcaagtgtaaatacaaaatataatagctctcatttagggaacaggccacarttgatgactcctcagttagagtggctgagaaatcctctctgagaaggagactttgtaactcaggcctaaaacactaagtgtcagtcagccaagctctaaagaagagtgctaggcagagggtaaaggtcacgtaaagccctaagacaggtgagtgttctccatccaagcactggaaagaagacgaatgttgtcagggtgtgaaggagggaagaatggcaccagatgaaggtgaagaggaaggaaggagccagatcacacaggtccttgtaagcaaagtaaggattttatttctttccttccttctttcctgccttgcttccttctttcttctgaaagcagtgggaagttattgagcagagttaagcaagggggtgataagatttaattggggtttgtaaagatttcaaagaggaacttaaaataacagaaaatatcagagaatagcagataacattccagggcatgaaggatggtatccaaagggaagaagctaagccagataaggtagccagagtacaaggctgagaaaacatcaagaaagaggagaagctggggaaaagccatttcaaaccccttctaggagtgaagctgcatttgaagaggatggtaagacaygtgggtttagatatgattagtcaagccttcagctggggttcttagacagtcatgcttatttctaatcttttatttctaatttaatttgacttataactaaccccagtgtttttgttttatttcagcttcctttttcttcatccaagaaattctttaaaaatgtgaccattagttatcccgcccttttaggccaaattttttcagttcttcttgagagtggattataccatgctttctgtctggaaaatctcctgatagcaaaaacttactataatattcccccttgaaagtattcgggaaatccaggaaagctatgaaagacaagaaactagtcttaaaaaaatggttctgttttttacaaaattcaactgataaataagtwtatgtgacctgtttttagataacgcactgtattataaaattgccatttttatgggtccaaatagaatggcagctactttaagtggctcaacctggtaacttatcagacattttggatttatatacactgttcaaataacaacatgtcaaatataactgtaaaataaatttacaatttttaatttcaaccgctgagcagaaaaaaaaaaaaagaaaggaatttccactattctaatatttcccattccagcaacgcagaatctcagtcagagtaataataagctttaaccaccagagggcactagaaaactacctttgggctccgctgttgcgctaacctgagtgagttcctatgaaatttctggagagctctcctaatgaaacagccttctgctgatgcctccgctatactatatcaaaatgcaccaagtattttaaaaagtgattttaacaaattccttctattttcctttgttgtcttccttaaacaaatttcagtgaagatgtagtttgctcccttctgaagcaaaccagcagggagcsttattaacatttttaaaaaattaggacctttctccaggtaatttacaacaaattaagtagatcattattttagatagacaatcktggaaagttccaagaaaataaactccacaacttctttttgttacttgcttcgtttcccttctttcaacctccactacggaatttagatccagtgaaagttttgtgttttgtaataagaacaaacattttcttatcgaaccaacaatatttgaagctaataatctcaccaataatgtatttttcactggattaaactgctggcaaacagtctatagctccgtttcccttttttcaacctccacaagcagaaatttaaatccagtgaaagttttggttttttgtaataagaagaaatattttcttattgaaacgacracatttgaagctaatraaagaatctcaccaataatgtatttttacactggattaaaccgctggcaaatagcctaatgtttaacaattctgtcataaattgtgcggaatgtctacttcctaaattggaaaatgaaataatacaacatggataatttaaaattcatacactgcctwttttttttaaagattaaaatggtttacagtaaaaacatggatcaattatttttaaataaaaaggaaaattctgaaaacaactaataatgaaatgaagaataacaattccaaaacacttcagagatgatgtctatatgaagaaaagtattaggttggtgtaaaagtaccttccatggcaaaaacctcaattaaatagtttcctcagtaatttctaagaaaaaggaaaaaaaaatcttcaggtcaaatgagggagggacatgtaagggacagaaaagttttatctttccttccaatgcttttcggttcttggaaggattatacaaaatagacacaaatagttaaacagggggttcccaaacactgtcctgaccaatgttacttgtgctgtctcagggttccatggtcaagcacatttgagaaacatttgtacaacattctgacagcaagctgaacattaacaccctgaagattttgagaagttctggagtagaaccacctgttcggctctgtggaaaccagaattttccaaatttgtttgaagatagaatatttctgcatgatccacaaatacaggagcttacataatatttatctctgcttcagtacagagagcaattgcagcatgctttcctycctttaagccccgagattattctaccttcatgtctttctattcaccttcctctctgaagttcaggggtgggactgtgggggcattgaatccttctgtgccttgtgatgcccacatttactaacagtgagctgtctcctcccatatttgtcattttaaattgctaatagagctttctctgaggatttttgatagagattccatccttccatagttgctttgtttctgcctgtgccaggcacctcagaagtaattaacaacctggtactatttttaatgtttgtttctatgccttgaaagtctgtgatggttcctatccaaggcaggtggtgtaaatattcatctcaaatccaaatgaagcctggtgtaaagtttcagattmtcagggasaatccagcttccttgttttctccctttgctaatgggcaaattgtttttcccagtgcagcattcaactgaagatctgtttttccgctgttatgtggaagacctgaattccagatttttggtttacacatacctctgtttttcttccatccatatgagggaacaagtctttcttgccaacctttgcaagtttccctgtagcctttaattttttccgcatattctgatccctgaagatgtcccttactttcttgttcrctaagctaagcatgtaaaattgaggaccaatgtactgagcccccttttatgaagtctggcaattctgtgagcatccagtctgcatcagtgcagcaccctgagttagagctctttgttaggcatcatagaacaggaaggacacaaatagtgtccctggcaacaaagacttcagctcctcccagctcaggaggctttcccaggacatgtcmtatagattyggctctgcacagctgttckagaaatctgaaaaccctaagttgcactgttaacccatcatcttgttagccctgcccaggatgtcaaagggggaaaggaaatcaacatttttctgcattaaatgstgacttaaagaaagctacctccatatttgaccctgtaaatccattaaaaacctgggggcctgccagaaagtgcctttatgcttggctctgtattagctttcgtgactttcctataatgaattgtagcttgcttgrgtcattaagaagattctgacagggaatcagctggaatctgctgttctttgaaggactcaatttatctatgattcagtgcttaagcagtcaaaaggcttgaaggggtcagtcagggaacatagctcataactcttataggtgcattgacttttagtatatgcattagataaacttaagacaagaaaataattacttttcttgccacctttgctcatttgttatttagcattccaggcaagggttaattaaaagcttctgtgtgttggctctrtggctgatcacaggccaaaattaacagattgaagctgtactattacaagattacattatgtctctgttagagatagcaaccaataaaactggatagtrctaagtaatgctaagctattaacttttaaccttattatagttttatattctgtattttctaaatgtgtctgaatgtcttgttttactttaaaatattttgtaattcctgtttcgtattttgctttttagcttattaatgtggctttgggtaaatgcatttccattgaaaacactacagtcattctggaagactgcgatgggagcaaagaggtatgctaaactgttttctatctcatggtagctgataggtgcagggtatgacacattcattgctcaactgagaaattcatctttgcccaacagaaaaataattttctaaatttctttgtaaaaagagagtccaycactaaacacaaagacagtgactaagggaataaaggtgtgggtcckgcagtcaactcactgggtccagaatgaatccagtcctggcaccatcatttgcaaaagcgtgttaacgtctgcagattccttaacctttgggtaaatggtagtgataatcatgcctacttttagaactggtgtgaggctggagttaggtaatacatatgaagcatgtagaacaatacctaatgcttactgctctgtaaatgtttgctgtaataataataaagataaaaatgtaaaaaatgcataacatagataaagatactaaagagacaacatatttctaaataatcattctaaggaagcagtcttattgtctgattccattcttctttcccctcattttcccgcattttaagggagtaatggaaataaccaaatccatgatccatggtagaaactcctataggaaaactccccaaactcagagcgcaatggttagtagagggagtcgggccaggaagcagggaatagagactccttccacagtgctggaggtgagctctgagtgattacacttccctctctaacatacattccttaacagttctgtgtttgtggaaacagttattggtttgagtggcaaataggactcagaggaaaatggattcatgaatagaaatcagttcccaaaattgcagattgttctttggtacagagattattttgcaatggtaatctaggcttgttaagtcttacatctttgctttgacttcaagatactgtttatattttttggtgcatcccatctctacctcttaactcagagctactactagaagaaaaggtatctctgttgctatatttagctgtgaattgtaaacctgaagccaaggccactcttttttaattaggaaagaaaggagtcaaagggaagtgaagaagtgttaaaactcattaaaagaaataaatttcacttactaacaaagaggaaataaagtcataaattgtaaaaacaaaaccacaattatttcacattatatgaaaggaaagtattaaataatgcatttttttttttttaggaatcatcatagcagggagtttttgtgccagagtaaccagcattttatctgaaaacccaaattctattcttgatgaccattgagtctttctcaattggatgctgagaggcaaaagtataaattatgcagscttcgacttccacaaagccccagctcccttttagtctttgttgctcatttttagcttctgcctcttgtggtttgcttgggtaataaaaagtaaagaaatgtggaggaagttaactcattttcagcagaattaatgaggcttaataccaagccagtgactacaacattcatccaaaaaggctcagaaagaataagacccttagattgaatcatcaagctctatcccttaccttacctaaaaagtttccttagttattaacctttaaagcggttgaaacgtattttttcaaggtaatatctagcttctcttagtagcacataacttccttatattatgccatacttccatgcttcctacatgttaatgttcacgtgaatcacctggggagtttgttacactgcagattctgaatcagtaggtcggtgatgtggctgagactccgcacttctaagtagctcccagctgatgcggatgttggtccaaggaccacccttccaatggcaaggtccaacacaatgactttgatctaacctgataatcaaagttaaacttcacttacaatacaaatgattcattaggtaaaggcatttagatagattttaccagaagcctatttttttcaaatatgtttatattagtacaaaacgataaatttcccacagacccagagcattagagtaaattgaccgggtagacaatagtaggttgtaaacaactgaagaaaaatgtttcagaattaaaaacatggtttcattacctgaattggtatttattttagacactggcaatttctccaagagcagtttctatgaactgggggatgccaacctggtagcaacctgatgattcctcatgctagtagcaaagaaggacttccacctttcctacaatcggacaaagcctttatgatggttttatacaaggaagcataaaatctccacccaagaaatttagggctatgactggtatctccctgtagccacccgtggcttagaaccttaatcatgtggtagactgaacattccaattctttaagcaccaggcttgtcgggattcagaacactgaaatgacatccatatgcagacagaattaattgcactgaataatttttattattgtaactaacatttattgaaggcttattgtgtgctaaacacttgacagtcattaccccaaccctctgagatagayacaatcgctatccaacttaaaaatarttagaaaaataagattagacagggtaaataatatgcccatactatcagaattacaaatgataataccaggacttgaatataaaatgtcagatcatagttcctatattcttaactgttgytaacaaaaatgtttgacaaagcccctgcctgtgtttgctgcctgaagtgacctctttattcatttcccccacagcttcaacaatttaattacacctggttaagacttattaaatgtggagaatggtgtatagcccccatccctgataaaggagccgtaaggctgcacccttgtgataacagaaacaaagggctaaaatggctgcataaatcaacatcagtctttcatccagaactggtaagcaaaagattggtacctcttctttaccacaaatttgacttttgatcaaataggacataaaattctcattgtcaccttcctcagtcagaagttttgtgtgtttgtgaccatgggattatgtaaaagttcattcacagagatgcatggatatctttcgraagttgacaagtccttttttttttatttttcaaaatttatttcaaatgagttattttaaatagaaatcaccaagttcttctagttgcattgctatcatttgcttcagtcaatcaacaacaccgaaagtcaggcttaaargctagaactggtccccactggtcatcagtaatgcttataaggagaggatatgggcaacacaggaagcagcatgtctcctacaagtcctgcactttagagtgaatctggttcctcattctgccccctttccataagagactcttcccatcccctgtggtacccagaaaccggggcttctaagggtctgctggagccaactctcaccagctcgctggagccacttgtgcacacccttgccagctttgcatttaatcataccacattggtagctggaaactggccatattgggagtatttataccacagaaattggaagatgttactggatcagggatacttttctgaaggtccagttgttccatttaccagaacattcctggtctactgtattcattctcaaagtcctctccatwtktcccaattacattttaacagaatacggagtcataagccttggtgtaggagcttgggattggcgagaatagtctcagaattgccttcttaaattttctacaatctctccagcaggtagccaccaaatctactgtctacagtaaatatttgggtatttggagactctcagtttgtcctgggctatccccaaagtaagcacctttgcttcctttaggtgcctccgttccttttaacaacacaatgactattcttttctcaacatttttcttcctgctcagagccaaaactggggcctgagtaatgtattctccaacatttctcccattagatcttctctgttgtatttcaattctttctgaacagttttttctctttagtaataatggttattattgagttattcagaaagattaggaattattagcatatatgccactaattttattttgcatagtgttaggaaatccataaacatgcagtgtagtgaataacttacatcttaccttctccctgtgccaaagtcaggagggagggaaggagaaagggggggatgtggtaaggagagagagagagagtgagagagagagaatatgaataagaacgagaactaaaacacattcttcatctccagaattgaatcttgggaaagagttcaagcatagcagtttctcttaagcggtaagctgatttggtaaaggaggtaatttagttaagatagcaaaaattagaaagccttttccctaccttgtttgtacctatgactttggaacattttacacagctgccttctgtcttgggtttcccttttgatgttaccaaatgtcctggagatgaatagcttggtgatcagctttcttcttttttcagtttttcagtagttttcatgctattgctactaggtctcccattatatgtaagtcttaaacaacaagagaagtataaaatgagacttccttacaaatccttgacaatactcaagcatcgtatttccaaaatcctgcaagggtgacaatacttttgtagcagcaatctttaaaataaattattatgaaagtcacccctgtttgataactttttaaagtttaaaaacaacatgtgtaattaagattgtctttgtcatagtcatacgtaattaagaaaatttatagatgaaaaaatatataagccattagtaaggtctatctaatttatctaccatttctaggatattcactaaatattaagcaataatataactttctttaatgctgttgactttttcctaatctggattttggacatcagttattatgaattgtcagagattatggtaaggagctcataaataaaatacatcacttccagaattttgtaatccaaactcacaaagacacctactttaaaaattaattaactttttgttacggtatgtattctttctttaccatcaatgaagtagttatcatctatcaaatccaataaatgtcatctgtaatgttttctctttaaagagtatagttctcagccatatcatcaagaaatttttcttttgcctcctgaggacttaaaagtcttatagcttggtggaggatgattacttagtctgagacagagacaaatttaatacttttcaaagtctgtgtttatgttaataatttagttcagaagaattcttaaaaatcaaaaatataactgcctgtccatttttttaattgattttcatttcttcatattgcagttatcaaattcagcctgtggctcattcccagctcttctttctctccaggtgaatcacattgtttttgaaaacaatcagcaattattatgcttggaaggaaatttttctcaaaagatcctgaaagtagctgcctgtgacccagtgaagccatatcaaaagtggaaatttgaaaaatattatgaagcctgaagtgtaactgatgtttttatatagtaaacccattaaatactgtgaaaataacactgaacttggaaactatatttctcagcggtagtttaaattttcaattttaataacatttgaatggaagattttttataaatcacaatatttggaataccaaaagatgactcaggaaaacagtccaacattggactgaagtccttcttcggaactgggtggcctttgaattgcctgctttccaccctrtgctagacctcatcatgcaaatttccctgtgaaagctaacaggtaactggaaatgaagacagaaggacttgagaaagcatgaggatattcccaatgactatgtttggtaataatcagctcttctggcccacaagtaggaatgatcaatgagaacttaacttagtcctttatttggggattttttcatcaaacaaaaatttcttgagttcttatggctagaagacctcagatgcccacagctgtcacgtttgtgaaatccctccagactacatgcatgcttacctaacagtttgaaatagtattgatctactgctggtaaccctgcttgatggcagcattttgatctaaattacataatggtttttcccaatctgaatcagtggaaaaaaatttaagtgaggaagaagaggccttcaaatgcttatttaattctaggtatgaacactatttcagttcattttgtgcytttaaaactacagttttaaagatttatgataccaataacttcctagattcatgtggattttttttaaggcaatgaaaaaaggctggattataacacactgtagtaatcaaaaatgcatttaagcattgaatgcactctagtgcagggccaagtaagaggagttgaaatgagtaaagcagaaatagagctgctgaaagtttcttttatataaaaataataaaatactactttagatatagtagcattcacagggatgaaatatgcgaaaaatgggttctaaaatatttcaaagggaaaatgaagtgaaggaaacatcatgaaaggggaaaggaatgaggtaaacaagtcttaggaagagagttaagaaaaaattccgctggacttggccaaagaaagaaggggatctagtatctctatgaaggaaaaaagagtaaagccctcagtgtgaacccagtgagaacactgacaaatttgggaaaagttaaatactgatttcatccaaataaagcctctaatcttaagcataccaatactttggcataccagaagacaccttagaaatcaggatagcctttgcattcattttggtaagaaaactgatgctgagaggataaattacctaaaaatcttaaaacccaggcaagttagtcaaagaatcaagattagaattcaggtttccagagacagggctcattctaatgcctcaggtcactggcccgaacaaatctgcttcacagaattccttagaaagagatacacaattctttgctgggattgggtccctggaggacaaccatactatattcttgttaatatgttttttctttttttaaatttaaacttttgttcagttgagatgattgtgaaactaggtatctttcattctgactcctagtttaacatttaattttgactcccaatgagttacgtaaaagcaaaactataactaagaatgggaaaaagaactatttctgcacatttgtaacatatttaagatgttttcttcatataattgaaaactgcagatgagtaagagaatgactaggaaatgagatacagttatatgacacataatgatgttttagtcaacaatgaaccacatatttgacattggtcccaaaagattatattaataatatggtatctttagtgtgcttttctatgtttagacacacaaatactcaccatgatgttacaatagcctacagtgttcaatacagtaacatgcacaagtttgtaacctaggagcaacagggattccatatagcctaggtgtgtagtaggctacctacaccatctaggtttgtgtaagtacactctgatattcacacaatgatgaaattgcctaatgacacatttctcagaatgtatttgtgttattaaatgatgcatgactctaattcttttcaaaacagagccatatggggcaagggggatggggggacgcaagtcagttgtcaaaagactaattgagttactgacaaactgaacatgctaggtgcctcatgtaattcttcatgtaactaaaaaatgttgagaggtttttttcccccgggtatataggctctctttttatccgaaaatagtttccacaaagaagtcaactctgttctgaaaaaaaatgaattgcattttgaatacacttatctttgggtatatcaactaaaggaagttggatttttttccttaacagaaacttctgcagtcctctcagttcacatcctttctgactttaccctgacaaacttattatataaagctatatttaaatctatattgtcaatataacaaaggattgtttttgaacatcacaaatttgttcttggatagaattttatacattgcttttcatcatatatttgctcagttactctaagaagcaaggaactgatcactagttgggaatctatatgggcctaaacttgagtgtattgatttattattacatctactaccaacattttcttaagcatagccttctaaattttttcaggagattagaataaaggtatacatgctactcggtcttctggtaattctagtgataaacctttggatgagacaggtcctaatcagcactgaattcttcaataggaggctgtgttacaggagctacagatttttccctggattagcttaggtcattgcctttactttaaaaaaaaaaaaaaaaagtctatgcatcttgttaccttgaatacaagggtggtcttgataatatttgacagcactaaccaacttaccaagccatctaagtgcttctgagacttttcagtttgcacaatttctttctccttttcaacagttacccagcgcttctgccctactctyttgtaagctgacacagttgttgttggtacaatcttgttctatcaccagcatcaaatttgcttaatactgcttgttgacatcccctcagctgtcattcacagcaaaccaccatgtgccatgatcacaatgtattattagcttcgccacactaatttggaaacattcttttaratattaaaacaccttacttctagtattagtttgggactgcagaggggcaaagataccatttacagtatataggagtccaatattcccaaccaaccttgatttcatgaatggcttgtaattatttctagcaggcactcatgcaatagaataagattgaaacatgccagagagtaccatctttctttgttttaacatctctgattgaattcctatattcagaatacaagaaaaaaaatttaccaaccaggcgcagtggctcacacctgtaatcctagcactttaggaggccaaggtgggtggatcatgaggtcaggagttcaagaccagcctgggcaacatggtgaaaccccgtctctactaaaaatacaaaaattagctgggcatggtggtgggcgcctgtaatcccagctacctgggaggctgaagcaggagaattgcttgtacccgggaggtggaggttgcagtgagctgaaattgcgccactgcactccagcctagacaacagagcaagactctatctcaaaaaataataataataatttttacctcagaagaaagccccaaaatcttggattaaaacaaaaaaatgacattgggtgatgggaaaaaagaaaggaactaattatcattgagtgtgtgtaggtactatttgtgtaggtgctatatgtgtcccatctcactgatgggtacaactcatcaaatgactctcattctccctgttatatgaacaagaaggataactcccacatacagatgaggaatttggtaaattgcccaaggtcatcccacaagtaagagataaaacccagtttccattttatctggctcaaaaaaaatttctctcactataccatgctgctatataattaattttcttctttacaaagggctgtcatctcaggtgggtgcatttaaaagtttcttggtctcagattactgatgccacagtattgagatgagattgaattaaacccctttggcctcttttggatgttgtataaacagaaaaaagaagcatggtctctctctctctgtggtaaccaattgatgtgtaggtataaacatggctacccccacatgttttgctgtgatctatctctttgacttcatgcagaacctattctttttcatctcctggaccaaatgtgaaagaaagaagtggacatgtggaggattctttctctgtgaataatattgaaaaagctccattttctggggaaatacccatggttcattgtctgatgccaagaaagaattcaggacacagacacacatgaggagtgggtttaggagtggaaagtttaatagataaagaagagagtgagaaagcttcctcatgttgagaaagacagttgctcaagagagggttttctgggtttggggcaagatttgattgatttcatacagaggcttgaggaggcggtgattgatatacatagggcccggggattggtttaaccaggtatactacttacatagccggtgaaaagactggccctcccaccctaaccttttattatgcaaatgcatcttctacctggctgtcaccatgacatttgcacacgtggcttcacttcaccagtgccatgtcacccacacacctggtgacaaggaaaagggagcaggaatcaccatattgaatgtgcctggcttccaggtacagctgctagctttacatatgggagcctctagcttgcatatctatacttgcaacttgacttttcaggctgctttttgttagaaaataagtggcttgggggctgctttttattaaaggaaaaatccaccgagaactattttaccctttctaatggcctaaaataaatttttaatgactcctgtattaatattaccaacccttgatccctccaacctttaatcaaagctagcagattgctcatcttgaacagaaataaaaagttaaaaagttggagtcctttaaaacacaaaccatgactttttattcctactcattgtgtaggttgtcactactgtgcttttgcaacaacttttgcatgggttactcaatagttgctacaagacaaaatgccttacaattagaaaaaaaaattaaccagagatattgtacaaaatatttattttttgacagttttgaataagccatataaagtattatatatccctaatgaagcttaatggatagtattccaggtgttggtggtgtctgtatctcaaagaaagaaaaaaataacatcacactaaacagatttaatgcctctgttttcaacctaatggaacaatagttatcatttcaattagagtcgctttgcaagtttatgtgaatctttgctttgtaaaaacacatacaaaacacaagggaaaattctcattttccagcaaatacagcaacttctaatatgctgtttctaataatgagtcaccatcaaataagtaataaatatttttttcaaaaacaagagctttctgttttattattgattgacagatatttaccagtttaaggatattggtcataagcatctatataataaaccctttatattagatgttaaattaaaatttttcatagcatgaatagatttttaagtgaccactcaaaaacatagcaatttttgtaaatatactgtatgtgtgtgtatatatatatatatatatatatatttttttttttgatgctttgatctggaagaaagaaatatcaagagtttctattcacaacataaagaaaataaaatgtttttagatatttttaactctttcaggtgtatagctttgtctgcatctggccttctgcacaaaagtatctcaagtgaacttacactctggataccattttccaaacttgaaggagtaatcaagttcttaattatcagggtgcttgttatttagttgaagattacacacatgtcttctgcttcaaacaactaccccaaatttgctagttttatacatattagcttaaaaacaagagaagccaaagattaagtaagtgaattgtgttaaagattgcctgaaaacatttgctaaggggagaataaaactaaaactgtggagtataaaggatgttggaattaaacatttttaagtactttttcttttgcatctgatcgactgaagttattataaagaaggaatcaagtatgtaactttaaattctaggtaaacatccaaattactttctaaattcatttccaaaattctcctgtgctggcagttagctactagagatcatcatttgattttgtagtttgccatgttctgagtgagttcagctgcttactactacccatgtcattgtgtttgtattgattgcctggctcagttatctcatgttcttcatgaactatatacacattttcattgtctttaaacaatactgagttttgaagttaagtagaatattgtaggggttatcagaaacccatattcattgtggtatgtttctgtctgatactttaatattggtaaatatagtttttgacattgcattttacaatcctattgttttttagagtgatgaaagttcaagttttaagagaagtggttgcctttctcatactgtcaaacatatttcttctttattatactctggtgctttatccttctccataattctctattattacttattttaaatgttttccctatcacattgaaaaacttaaatgtccgttctccatttgaaaatatgccaaaagtatgatcccatgtaaatatgcagaaacgattgctatgaaaatgtcagcatagtttaaatgtattactctgatgattacagagatttcttcaagttgttcgtgttaagatgcatcttaaacatgatctcagttccttaaaaaatgataaaaatttttcatgtatattacatatctacctaccagaaatcctttttacaattttatatacaatcattttaagacctttttgaaataaataatgcaaatgaactaaaataaagtgttctcttgatttctgaagaggtattcattaattatcatagtagctgctgatatacaaggattctttctaaagtttaaaaggcagctaaacaaaataaagtctagagaccagaaataaagacacaaacttttattgagagtaagtcagacacagcagttctttatttaaattgtggatagtttggtaggtagggggagagagagatggtagcaaattctgtgccttcaatgtagcattatatgaaaggtagattttatattggcagagaaatagagctattattagtttctatttatctagcaacagaggaaaacaaaaaatcatgtaagaaataccagcatttgcacaataaattaattctccctcttccctggtaccagagtccttaccacccctgaactttgaatcacaaaagctcaagtaaaccttcatgtgtagctaccagtttgtgttcttaatcatgttccccctgagtttcaaatatgttaaaaatcccccatgcaatctgaatcagacctttgtctttcctaggttacaaagactcaaatggccaaccatcaccattatgttacctgaggtcacttaactctgtggctttcaactctgtggctttcaactctgtggctttcgtgtaagatggcggtatagggccatggacaccaatg

SEQ ID NO: 95765 - DNA, 44881 bp, Homo sapiens
  misc_feature (1)...(44881): n = A,T,C or G
actttgggaagctgaggcgggtggatcacctgaggtcaggagttcaagaccagtctggccaacatagcgaaaccctgtctctactaaaattacaaaaaatgagccgggcatggtggtgcatgcctgtaatcccaactactcaggaggctgaggcaggagaatcacttgaaccagggaggtggaggttggagtgagccaagatggcgctactgcactccagcctgggtgacagagcgagactccatctcaaaacaataattaaaaaaaaaaaaaaggattaaaaaaagaacacctgtatagggrctttccatcaatggaacttgcaaaactggaaatttctctgagtgaatcagtgggtgagtggtgagtgaatgtgaaggcctaggatattactgtccattactgtagactttaaacattgtacacttaggctacactaaatttactttaaaaattttggccagccatgttggctcacgcctgtaaacccagaagaggcaggaagatcccttaagcccaggagttcaagaccaacctgggaaaatggcgagattcccatctctacaaaaatagaaataaaaaattaaaaatgttctttcgtcagtaataaattacccttagcttactgtaacatttttactttataaacattttaattttttaattttttgcctcttttataataacagttgtttaaaacaaaacaacgtacaaaggtacaaaaacatttttatagccttattctagaggttttttcccacttttacaactcttttgttaaaaactaagacacaaacatacacattaacctaggcctacacagggtcagactcatcaaggttgtcgctaggtgatagaaatttttcaggttcattataatcttatggtaccatcatcacatgagcagtccatcatcgaccatactctaaacttagctcctgcctcatttgcatttgctagtctcactgcatagaaccttcctactcattcaattaagaaacacttttagagcaatgccctgtgtcaagcactgctctacattgagaaagtggctcagagcagtctgaggaatgtgagatatgcaaaattggttaggcccagacaggagcaggagacacctgtcacatcctcggcacccatgcctgggggtaattgcttagaggcattttgttttctctttcgttttctgtaatttcagactagctgataaattacccacaatgttaccacaagttacacaatgtgaccctcacctattatcttcacgttcctggggtttgtggtacaaagatcaatgtatagacaaatgatagcttattttaatgaaccattgtaaattcttggtaagcagcttaggaactgcatcctaactttttcatcttttttttaatctttaatccacttgtaacggctgctaatcggagcatatattcagggcaacttgaatccatgactcccaggctgtagacctcaaccctggcccaaatagactctctacttatattaattttgcttcagtttcttcctttaggtcaacaagatgaacagtcttcccagctgggctatacgtacctcggggtacaggaagtcctgtacaacttacaaattcctatatgctctcacttttgccagtctctccacctgggctagtacccaattcccccctttttttggttgggagatttggaagtcctgtaccctgaggtgcatatagcacagttgggaagacccttcaaagggatctgtgggcccagatatactagggaaatcctgaatttttgtatactcttttctaaaattgattggcctgcaaactcagttttccaattctccttttacatctccccttccacaaagaaaagcatagcacccttttccattgcctgtcgtgggtagcgactctctggggcccgtgtcacgcaggtggtaaaaagaattcatcaatacagttgtaggtaaagaaaggcagatttattagacaaagcaggaaagtatgttgcaagggtgcaacaagcaaatcagcaagagaggagctgactgccaggaaacaaacgtttgctcgggatttgacagaatggtgcttgggctgtgtgttaagagggctttgtgcagtactgatagtgctgaggttgcagtgagctaacttgcatttttctatcagctgaggtgtctggtaatagctgggtgcaggaagatggtgagtaatttgcacaggaggactatgtatcctgaaccacgaagaaaggtagacttatagcttacctgccttttctttttgctttccttcattcttaccagcccaactccccctccctaaattaggactccacattgcctgggtgtaaactaacaggaattgaacaagggacacttctagaacatatttttccttttctttttgaaaacactttctttatatatatatatatagatttttttttattatactttaagttctagggtacatgtgcacaacgtgcaggtttgttacatatgtatacatgtgccatgttggtgtgctgcacccattaactcgtcatttacattaggtatatctcctaatgctatccctcccccctccccccaccccacaacaggccccggtgggtgatgttccccttcctgtgtccaagtgtcctcattgaagaacctatttttccacagggcatatccttgagcgctaaacaaagagggcttagtaaaatgattgactgtttttatttcctcctttatcttgaagatagagatctatctgcctatccctttgtctatccaccagcttgtccatccctccctccatctttctcagaacttagaaatgaggtatcagagtgatgtaaccacccagtggattcttcctgcctgctgcacaacaaaattgactcatgggcaccatggcattgcaataaagaaagtttaattgacacaagtctggccacacagtgtaagagacggagttattactcaaatcaatctccctgaaggctcctaggttaggggtttttcaaatatagtttgctgggcagtggggtagggtagggaacatgctaactggttgagttggagatgaaatcataagaaatcgaagctgtcctcttgtgctgagtcagttcctgggtaggggccacaggactgactggtgggtccaggtggggccacccggttgtcagaaatgcacaaacctgaaaagacatctcaaaaggccaatcttaggttctacaatagtaatgttatctgcaagagttattgcagaagttgcaaatctgacctccagaataatggctgacaattatttagaattcaagtccctctcattctcatagtttagttgccttgcattagttttacaagaacactttgattttggggaagggctaatatcatttcaactataaactaaattttccacaaagttagcttggcccatgcccagaaatgagcaaagacagacagcctgtgaagcaagatgtcaaatttctcttactgtcataattttgcaaatgccatttcaggaacatgcacagtagtcccccctacttatgtgctcaagatattaagtggaaaattaccaattcataggtttaaataaccaattcagaaataaccaattcataggtcttaaaatgcatgccatttcttggtagcatgatgaaatctccaccgtcccattctgtcttgcccaggatatgaatccccccttgcccaacaaattcatgctgtctacactacccacccattagtcacttattagccctctgaattactggattgaaaaaacatagtatatatatagggcttggtactattcacggtttcaggcatccactgaggggtgttgcaatgtatctcccacggataaggaaggactggtatattaacacttttatttgatttacaaaataaaggatagtttatatagttctgggtaaaattaattaattaatttaaaaggaaaaaagataaaggcaaactttaagcttgttaaaaattaagtaaaataatttggattatttaattggacaaagaggactggctttgccaatgaaacaatatggccgacatgttccataaattggacaagctaaacttgcaaatccacagttttgacgaaaatatagtgagagcacttatgaaacatcatgccagaaaataatccattcccagaagttgtgaaaagagtttttagatgtcttttttttttttttttttttttttttgagacagagtctcactccgttgcccaggctggagtgcagtggccagatcatggctcactgcaacctcaaactcttgggtttaaacaatcctgcctcctaagtctcctatatagctgggactacaggtgcacaccaccatgcctggctaatgttttgtatttttggtagagacgatgtttcaccattttttccaggctggtcttggactcctgggctcaagaaatctgcctgcctcagcctcccaaagtgctaggattacagacatgagccactgtgcctagctcgatgtcaacttttaaaagtatacactgggatatgaatttttaaaatacttttatgaggcacagaagcgaaaacgtttagagtgctactttctaagttctggagtcatagagaagagtgaacaagataattaaggtccctgccctcttagaacatatatcccaggtttgctgtttataattttaactcaatatatatacaatgaaatattattcagccttataaaagaaaaccctgttatgggtgacaacatagatgaacctggagaacattatgttggtgcaataagccgggcacagaaagacaaatactacattagcccatgtatatgtgtaatctaaaaaattcagattcatagaagcagagcatagaatggtggttgtcagggcttcagaggtaggaaagatgggagatgttgctcaaagttacaaagtttcagttaggcaggatgaatagattctagagatgtaatgtatattgtatacttgcagttttcgttttcgtttcgttttgtttgtttttaaatagagagagaaaagctctcactctgtcatccaggcagagtacagtggcatgatcatggctcaccgcagcctcaaattcttgggctcaagtgatcctcccacctcagcctcctatataccagggactacaggcacatgccaccatgcccggctatttttccatttttttgtagagacgaggtcttagctgtttcccaggatgagaatagatcttaaatgttcacagcacacacgcgcgcgcgcgcgcacrcacacacacacacacacacacacacacacgcaaatgataactgtatgagatgaaggttatgttaattattttggttgtggtaatcatttcagaatgtatacatatatcaaaacattacgttgtacatcgttatgatatacaatctttgtcaattatacctcaataaaactggaaaaataaataagattttaactcaaatgtcacttgcttagagatgtcttctctcacccaagtcactctatcacattgccttcctagcaattaaaactacctgagattattgccttttttggtctattttctctctccattctaaaatgtgtctgccgtgagaggggagatcgtgtctgttttgttttctttgtgcccccagagcctagaatactgtctggcattttaaagtacacaataaatgtttgttgaataaatgaatggatttgttagttttgtgcccatttcacaaaggggcaaagtgaggcctttgagagccagaagctctaggtcagtgactgtcctagtctatccaagcacagagcagctctggttagtgtctgctcaattcctctcccctcgcccaaacgtccctgagttgcggcctcgctcctgaccgaaatccccgcgggttctcctcgcagtgtctactggatcccgccaggaggcagcagaggcgccagcacccagtccgacgggacagcggaccggagggggtttccgcttccgggagaggctgacmgtttccgcttccgtccacttggcgagtgagacgctgatgggaggatggacrtactggtgtctgagtgctccgcgcggctgctgcagcaggtttggacgcaggagaccggcgggaaggcctgaaagagatggagcaggctctgaytcctgcccaagcggcttcgggggcgggacagctaggcgaggaccatcctggtcctctcagtggagcggcacggtccctgtgggaacaggaagggttgagagaggaagcacccatcatttcaaagcccgtgtgactgtgattttcagcggaatggagggtccccaccctctcccaggcctcccccaaaccagcgtcttcggtgggctggagcctggcatgttcagaacagttctctccctacaatccacctcctcttctgcatacacacgcgatttaggggatgcggggagatagacaaggggggaatacattcagagctctgggtcttggtttgcagctcagccgcagttcttcccgggttactgagcgagaggattcctaataagcccatggggtgattcattatcagaccagcggagcttgctctgtgccctcagcattcgtcgggaaggagcagccacaccatataaaagtgaaagcggccgggcgcggtggctcatgcctgtaatcccagcactttgggaggccgaggtgggcggatcacgatgtcaggagatcgagaccatcctggctaacacagtgaaactccgtctctactgaaaatacaaaaaaacttaaccggctgtgttgggggggtccctgtattcctagctactcgggaggctgaggcaggagaatggcgtgaacccgggaggcggagcttgcagtgagcagagagcacaccactgcaccacagcctgggcgacagagtgagactccgtccccctacaaaaaaaaaaagtgaaagcggaacagttccattaccttttatgcccaggtggggagggatggtaggaagatagttcacagtmctctgtcctgttacggctgtatacttaatcagcagtcacaaagtacaagttagtcaagtaaattggcaagctctttacatttctgagccatttatttatcggtatgtatttatctttgcctcacttggttgtgataatcatgaaggtaatttctgaaaagtgtttttagctcagctcytggaacataatgtatgctcatttttggcaatttggttttggctgtagctatctcccagtaagtattctgaaatttcaggtgaggaactccccctgagttttgcagtttaagttggaagctttatttctttctgaattgacatgtctttagttttagatgttaaactacaaagcctggtctggtctagtctaggacctaagacactggaaacaggaagaaatgggaaaattgtttagtcccagaaagggtgaaaggcagacccttgagctattttgaatgtgacaaaggacatttgggttttttaagagtcccaggtcataggatttgggaataaaagcaggttggtcaacctgaaacttaactactcttgctaaatcagagtgtttatcgagccaaagaaaagaactagggatatgagacatgaggcatatcccattatatacttactccgattcctgtctcccaaaacacatgtatgtgtggttaatatattctttttctttttctttttttttgaaacagagtctcgctctgtcaagcagactggagtgcagtggcacgatctcgactcaccgcaacctcagcctctgggattcaggcaattctcctgcctcagcctcccaagtagctaggattacaggcatgcgccaccatgcctagctaatttttgtatttttagtagagacagcgtttcgctatgtttgccatgctggtcttgaactcttggcctcaagtcatccacctgcctaggcctcccaaagtgctgggattacaggcgtgagccaccatgcctggccaatattttcttattaaggataatatgctaacgtcagcaaaaatctcagaggagaaagaaacacagctcatcaaagggaacattaatgattcccatggtctatgccacgccttggtagagaggggaaatgtggaagtaagtttatggactgaaaaaagtgctttttttcccacaggaagaagagattaaatctctgactgctgaaattgaccggttgaaaaactgtggctgtttaggagcttctccaaatttggagcagttacaagaagaaaatttaaaattaaagtatcgactgaatattcttcgaaaggtgagtactttgggttccagttttattctccagtttgaatcattatagcttttttaaagcstttgttaccaaagattctggaagtatatcctatggaatttggaaargaagcatagaaaccctattcttttccctgcattagacaacttaggactgaggtagttggtgcaaatagtgacaagttggtgttgtcctgtccttcaggactctttgaaatgtttcatcctgctaactgtttggctaacttaaagtaggatttaggtagggttgaggcatttctttttaaaaatttatttattattttttgagacagggtgtctgtcactcaggccagagtgtggtggcatcatcacggctcagtacagcctcaaccttcaggctcaagcagtcatcccaccacagcctcctgagtggctgggactacaggcgtgtgccaccacatccagctaattttttttttttaatagagatgggrtcttgctgtgttggccaggctggcctcggaattcctggcttcaagcaaccctccctgtcttggcctcccaaagtgttggaattacaagtataacctactgcacccagcaaggttgaggcatttctttcaacagtttatgcccatgccttttttaaaaaaacatgtttgatttttaaatcattgcctctatcataaaggaaatatttgaaaatacacctgcatattttctctgccctaagttggttattttacagttttatatcttacataatcatttggggttttttccacctggtatttcaaaacactttttttccccatgaagcttgtgctatgtttatttaatggtctcatgatttaacagtgttttaccaattttgttttaaaaaaatgaacttgctgcagttttttkgcctgcctttcgtatttggtgatgacatatcccagagtgttgacctcattcccataattattctcctgtgtgtatatattactgtcagacaaactctgcaggcattacatccttttcccaaagctgattgatccatttactcaccttagactctatcttccccactcccatgacatctctcatattatctttttttttttttttttttgagacggagtctcactcttgttgctcaggctggattgcaatggcacaatctcagctcacaataacctccacctcccaggttcaagcaattctcctgcctcagcctccccagtagctgggattacaggcatgcaccaccacacctggttaattttgtatttttagtagagacgaggtttctccatgttggtcaggctggtctggaactcctgacctcaggtgatctgcctgtctcgccttcccaaagtgctgggattacaggcgtgagccaccgtgcccggtgtccatatttcctatttgtgatctgctatgctcgagtctcatattacctatatgtgatctgctgtgcttgtctttgagtcttctagaatcacaaaattccttttccatagaatcttcccaaaagaatctcacctttctcgttatgtcattcattctacacttawatatgtttaattctctgttatatttattttaattcaaaagtattattaaatgtctaatatgtgctagagactataagggaaaagatacaaaaggaagtacagtattttgtcgaactcctcgcctcaagtaatcctcccacctcagcctcccaagtagctgggatggaagtacagcatattttactacacatttttctgtaatgcagattagctcttatatagmtaggagaatgctctcactgtattgtgggaggcatattggttctttgacaaatactttgccctactgaatgagcagctgaacacaaggtacacagcagaactaaaaaccacagagtaataaagtactgtgtgtgatggccattcaccctgtcgtttttccctggttcactttggccacatgctctgacttgaaagcatcacatatgaaactggtagagacaacttgttgaattgattataatcagatagtaattttcatagtgccaaaactaagcacagtagatttcgtgtgtgtaggtacacacacatacatatgtacatggtggtactcctatcctttaaaaataaaaaattgaggttgggcgcagtggctcacacctgtaatctcagctgtttgggaggccgaggcaggtgaattacctggagtcaggagttcgagaccagcccagccaacatggcaaaaccctgtctctactaaaaatacaaaaattagccagggatggtggcatgggcctgtaatcccagctacttgggaggctgaggcatgagaatcacttaaacccaggaggcagaggttgcagtgagysaaaatcgtgccactgcactccagcctgggcaacagagcaagacccggtcccaaaaaaataaatacataaaaataaacaaaaaattgacatttattatagcaggttttgggtataagatcataatctaggccaagtgtggtggctcatgcctgtaatctcaatgctttgggaggccaaggcaggaggatgtcttgaacccaggagttcaaggttacagtgagctgtcatgccactgcactttagcctcagcagagtgcacagtgagatcttgtctgttacccccaacaaagaagagaaaaggatcatatccaagtaaatttggcatttgctgttggaaatctttagattgggaaaaatgtatcttccttgttttaagtatgttaccacagagaggagtcaattattgattagctacaaacttgaaatcaggttttttagtgaatttaagaatataatttcttcatatgatagagagggctgatgaggggagcataaaacttggactgtccattccaatagacctgagtttgaatctggccttttccacttattctgtcttgtctttgacaagtkacttatctgtagcccacatagaaatagtgataatagtaacaagctcgattttattatgtagatggaataagataatgcatataaataaagcatttggttcaaatctttgcatactcaagtattaacttytgttattgtcattattttatactgttgacattttgatgaatataaatttgtgatgaacataaaattgtgatgaacatgttgatgaacataaaattgacaaacataaaggtgtataggcagcatgtttatcttcyattaaaagcatatgtgtcattcaccttttttttttttttttttttgctaaactgctgtatggcaagtacagtgctagatgccagggacagggaagagagccatgaattaagcactttgtgtgcatccagcagtctagtggtagagacagatagttttgtgagggtatgataagtgcagtaatagagataattatatgccatcttaaatgactatattccatgggaaaacaggaggtagtaggtctcataacagtaaaacaaaactactggcttttctggtatattaatattacctgctttgctcccttttatttcatgccttgaagaggtcaacattttgatggacatcatgtatttttttgtttgttttttgtccattgagttttcacttccaatatttgatgtgaaataaattattttctcagagatttggagaagctgagaaaaggattccatcagctcttttaactccctcctcccagtttctgttctgctaaaacaaatgcaaaaagtaagacctcagggcatttcccatggatgtcttagatgccgtgggatggacttgtcctgctgcatgtcttagcaaatcccagattgagggcatcacaccataagtacnttttcccttttggttcttaagatatttggaggtttatactcaaaatatttggagacatcttgtatgatgatggtwttacgtacattattgacatgtttccattcttttcctacagagtcttcaggcagaaaggaacaaacyaactaaaaatatgattaacattattagccgcctacargaggtctttggtcatgcaattaaggctgcatatccagatttggaaaatcctcctctgctagtgacaccaagtcagcaggccaagtttggggactatcartgtaatagtgctatgggtatttctcaggtgatgtattgtcatgactcttggctgtttgatttttttaagtattattatcatcattgccatttacagaaataatactattacaagttgtatccttagtgaaaaggacatttgccacagtttgaaaaacttgagaaaggagttgggggggtatatgttttaacttttttaggcacaatttttaaggtttggttaaattttatatgtattctcaatrtttaagggcaatcattggtactcttttgtttaggtatttccctcctgctgtgtccaggattgctgtgtggtggtgatgagtgctgggaggtgaaaaattaaaataagccatttaccagtcagcatcccaattaaatatttgatgtaactgtgatctttgagccaggcttatatattcattttcaagcagaggagttccccattttaaatagaggcattgtctgatgtgtttatggttaactgcatctggcttgggtctttctgttttcctttctttgctgaattrgaaggggttactctgaagagtccaggtcttacagtgtggtttatttctcaagtgtgaatattgcacaccttcatggcttgaaaattagaaatgtaaatatgctggaaccagacttcataactgtagactttgttatgtcatcattaaaaagttcgaggtgttgtaatcccagctactagggaggctgaggcaggagaattgcttgaacccaggggcggaggttacagtgagccgagatcacaccactgcactccagcctgggcaacagagcgagactccatctcaaaaaaaaaaaaaaaaaaaaatagttccaggtatttgtgtgtaacgtatttggaaatagagatcatgtagtgtgggcactttctatgcctcttggcactattgatactttaatctgtcattcataatgtgattggacttctctgcttctgccttttgatggttcttaacgtaaaatgcatctcgtgccttgtcaggtgtgcrtttgcgagtaacttgctgaaatctgttgtgtaatgaatcattttatattgtgttgtagatgctcaaaaccaaggaacagaaagttaatccaagagaaattgctgaaaacattaccaaacacctcccagacaatgaatgtattgaaaaagttgaaattgctggtcctggtatgacataatgttatccttcttaatagttgtattgaasatgagtcctttttgaagttaaaaaagaacacacattttaattacagggttaaactttgtatactgaacaagatggtgaaagcactgtggattgtgatataggaaattgaagttttaatctagactcagctaccacttttagctgccttatcttgaatgagttactttgcctctctgtgattcagtttttcatcagcaaaatgaggatagataatggcagataagtcttcggcacaagggccttctgttttctgttaagaggcgaacagattgtttgctgaaagtgaaagggccctgagttaagtaggaaggtttcaggagagtggtgaaggcttgaagtagrcggtgagacaggagcttacaagacagcttaagtcaaggccacaactggtattggaatccggaagaattttgccagagccaggtcagtgtctggagcaaatccttaggagcgagtgattattcaagataagacagtatctgatattttttctcttctatccattaggttttattaatgtccacttaagaaaggattttgtatcagaacaattgaccagtcttctagtgaatggagttcaactacctgctctgggagagaataaaaaggtatatgtacactcttctattaatatattagtatcttagaactgcgtggaaccaagcatggtggtatgtgcctatagtctcagctacttgggaggctgragcaggaggattgcttgagcctagaagttcaaggctgaggtgtgctrtgatcgcacctgtgaatagctactgcacttcaacctgggcagtatcatgagacttcatctctaaaaaagaaaaagaaaaacgaactgcatggaaagtgctgaaaccgggaatggatttcacttttatactgaaatttaatcattcacatttgagattatgaacatttatgaagtagcctttcccctgggtctagcatgttgtgtgattttttttttttttcacttaattccacaaggcatttgaggtagccaattgatacacagatatcactgaaatagaatggataatttgtatacatgaatttgattctttttcagttaaaaatatayaagcagatccatcataaaatcaaacatggttgaattacggcccaaattaatgtttaagtctgagtttgttattaaatgtgttattaatgaatgcattggaacaaaatgtttatgctcctcttaaaaaaatctttctctctttatgtttatgcccctcttaacagcctttctctttttgtctaccccaggttatagttgacttttcctcccctaatatagctaaagagatgcatgtaggccacctgaggtcaactatcataggagagagtataagccgcctctttgaatttgcagggtatgacgtgctcaggtatgtgctcttgccttgcrtnctattctctttccttattttcttgtttggaaaattctatagaacatggaatatctcactcaagaaagaacattcgactaaatcagtggttcatcagcttagttcttctttacaaycacccagtaagcttttaaaatatgtcctgagcctttcctctgaaccttttttactattttatttttttagactcttagtggaaccaaggacaaaactccttcattctacacatgtttcttgaggacctcttgtatgcaatgggtttatatcctagcagggagagaagtagtaaagaaacaggttgttttgggccttgtaagctgtgagaggcaattgagattttattctaagtgtactgggaagctattagagagttttagtttgtgaagcagggtgatcaaattaaagattagcctgggtaccatggctcacacctataattccagcactttggtaggccaaggtgggaggatcactagaggccaggagttctaggccagcttgggcaacatagcaagaacctgtctctattttttatatttttaaagaaataaaaatttttaaataatacaaattaaagattactctggttacttactgtgaagaagctagacaaagaagggagactataacagtaagtgttaggccaggcacggtggctcacgtctgtaaacccagcactttgggaggccaaggaaggatggatcacgaggtcaggagtttgagaccagcctggcaacatggtgaaaccctgtctctactaaaaatacaaaaattagctgggtgtggtggtgcacacctgtaatcccacctacttgggaagctgaggcaggagaattgcttgaacctgggaggcagagatagcagtgagctgagatcgtgccactgcactccagcctgggcaacagagcaagactctctgtcaaaaaaaaaaaaaaaacagtaagtcaagaggctatcataatccacttgaaagatgatctggtggtttggattagataaaagcagagagggagagaagtgggttggatcaacatttttttttggagacagagtcttgctctgttgcccaggctggagtgcagtggcgcaatcctggctcactgcaagctctacctcctgggttcacgccattctcctgcctcatcctcccgagtagctgggactacaggcgcccaccaccacacccggctaattttttgtatttttagtagagacggggtttcaccatgttggccaggcgggtctcgaactcctaacctcaagtgatccgcctgcctcagcctcccatagtgctgggattacaggcgtgagccattgcacccggcctcaacatatattttcaagaattttgttcattgatatttgggaaccattggtctaaattatattaagataatggttaaaatgttaaattttcataaaattgtgggaataaccaacattggcccagctgtcattgtctcaattagctacaaaataaacagattatagtccactgacagaaaacacattcattcagcaaattctggatgcctgccttgtgcagcctctagtacttgagtatgcagagctgaatgtaacagacatagttttcatctcttgtggagtttgcagaccagttgaagaaacaaccaagtaaacagatattactaaatggtgatgtactggcatgtaaatattagtggttcctaatggaatatagttcctctaatttaacttaaccatctttattatttaaaaaatgattatatattctctgattggtgttaggttaaatcatgtaggagactgggggacccagtttggcatgctcatcgctcacctgcaagacaaatttccagattatctaacagtttcacctcctattggggatcttcaggtcttttataaggtttgataccatttcttttatattatgtgtgtgtttaccattaatcataattatccattttccttaggaaacttaaaatggtttttaaagctactatggagttaagtgaaagttgctaacagccttagtaatacatgtctctgtataaatgacattctcttgaacttaaactacttttttttttgtaatttataaagacgtttaattacctcacagttctgcaggctgtacaagcatggcgctagcatctgctcagtttctggggaggactcagggagttttatttatggtggaaggcaaaatgggaacagactaattgataaacatataaaatttgttcatctacactggcaagccctttcgtttagtttacctatctgaaaaactgaattcttttttattctgacattcattgcatttggttgtgtgccttagaaacagccatcccctacccccagattcattacatttggtcgtgtatgtagaaccgctactagataccctacatttggttgtatgcatagaaacagccatcccccacctgttaatatgtcatctttgctttgtttattggygtatgttaaaaatcaaattctaggtcaggtgcggtggctcgtgtccgtaatcccagcacttggagaggctgaggcaagccgattgcttgagttcaggagttkgagaccagcctgagcaacaaagtgagatcccatctctacaaaaaatacaaaaataactagccaggcatggtggttcacacttgtagttacagctacctgggagactgaggagggataatcgcttgagcacaggaggtcaaggctgcagtgtgccatgatcatgccactgcgctccagcctgggtgacagagcaagaccttatcttaaaagataaaattatattaaaaaaaagtaaaaaaaaatgaattataccacattgaatttagaggtttattaatcaatgcattataggacttaaaattttttgatgcttaattttatgtattttgatatgattaaatgtatgtaaaaacaattttaaagacaaattttmacatcatccataattttaaaatgcctattgtgatcaactttctttgaatccttgacttaatctgtatatcaacatgtattaatcatttatgattttaatatagtttttgtattatatttaatattgcaaacttttgtgttactttatractgcacattttgttggatcagtgtaccaatgtttacattaatcctttattaggatttttttctattttagaggtgttgttattcagtaaatagctttgtacacttggatttttttccctctttaaaaattatttcctggctgggttcagtggctcacacttgtaatcccaacattttgagaggccaaggtgggcaaaatgcttgagcctaggagtttgagaccagtctgggcaacatggcaaaacctcatctccacaaaaaatacaaaagttagccaggcatgttggtgtacatctgtagtctcagctacttgggaggctaaggtggatgtgagtatcacttgagaccagggagaccaaggctgcagtgagctgtgatcacaccattgcactatacagcctgggcaacagagtgagaccctatctcaaaaaaaaaattatttcttcaaaaattaaaaattaaaaatgttttttaaaaatttccttatgggctgggtgcagtggctcatgcctgtaatcctagcactttgggaggctgaggcaggcagattgcttgagtccaggagttcaagaccagcctggacaacatggagagaccctgtctctacataaaatacaaaaaattagccgggcacactcctgtagttccagctacttgggaggcggaggtgggaggatcacccaagcctggcaaggtcaaggctgcattgagctgtgatcttactactgtattccaacctcagtgacagagtgagaccctgtcttaaaaaaataaacataaaaaaaattccctatggtggaaggatcataaagatcataatttcctctcggatattttgattaataaatttattttaatgtgagttgcatgttttctgtttgtttaaattcttaggcattttctttatgatggagaatgtttcaagaataggattcctgtattaaaaagtaaacatttgtggggattttgtttttgtttgcttcattttacttttggtaaatgttttctgttgaaaataagctaaatgtttactgatatgagactggaaaagtaatgttataaacatcttttggagttctgtacttcgaatataatgaagcagatctattaatgcaagaaattgtttgtataaataaattgttaaaatttacaaaccacagtaaaaaaaaaagccatttccaatttttcataaaacatatatgtgtatttgcaaagaaatatctagatttgttcattaaatgttaacaccagttaattcaaggtgagattaattatttttaagtaagtgttgctttcaaaatagaaataaaacaatgaaagcaactttcgttttagttaaaaaataataataataagttggccaggcacggtggctcacacctgtaatcccagcactttgggaggcccaggtgggcagatcacttgaggtcaggaattcgggaccagcctggccaacatggtgaaatcctgtctctactaataatacaaaaattaggcgggtgtgatggcttgtgcctgtaatcccagctacttggaggctgaagcatgagaatcacttgaacccgggacacggaggttgcagtgagccgaaatcatgccactccagccactccagtccactccagcctgggagacagagtgagactctgtctcaaaaaaaaaaaaaaaaaaaaacgaaaaaaaaattcattcaggaccacatccaaaatggagattggaacacagaaaattcagtcctacctgttagctattctgtactaacccttgaacacaaaagtattagctgaagtagacttttgtgaattggaaaagtgtaaagaaaactgtggtgagatttttgtattttttaagagaaatgatttcaaagttctttggcatgttcatttgtaacagtattctcaactattgagggagagcacttgttctcgtgtttgtactttctcactgtgtttgtgtgtgtagaaatgtgtaagttctttttctagaawtacaggattagatctttttacacaccttacttttwaaaatatrtatatatacaggaatctaagaagaggtttgatactgaggaggaatttaagaagcgagcatatcagtgtgtagttctgctccagggtaaaaacccagatattacaaaagcttggaagcttatctgtgatgtctcccgccaaggtgagtttctgggctttgttccttcgtccagcaaatactrtgtatatcatttcctggagtcttcattttgatttgactttgagtgatattttaaccttctaaggacaggcaaatagattttttcttaaatgtatttctgaaacaaccaataaattttgaacctgccataagacaggcaggttcaaatcttaactttcttagaagtcagcaaaaattaattagaaaataaagtggaaaataaaaagaaatcttattcacagtagcaacaaaacctataaaacacttaggaatgaatttattcagaaatgtgtaggaccaaaatgatgagaagtgtacaatgagatgtaatagaatgtttggatagagtgccagacccagttccctagttctccaaatttatttatgattttaaggcgatttcaagttttctaacttgacataatagttttaaagatttctttgaagagtaaatgggtaaagaacaaccagtagatctttgaaaaagacgattaatgatgactggcttgcagcactaggtaataaaatgttttataattacagtaagtaatactgtgtcattgatgtattgctacatagacaggtaagtggtttaaatcaggaaaaaccagaagaaaattcagtaaatattgatcactagataggaagagcttttttttcttctcatttacattttttaagaattaatttttttaaaagttatacaagaaggacatgttccttatataaaaaagtaaatgttgggaggccgaggcgggtggatcacctgagatcaggagttcgagaccagcctggccaacatggtgaaaccccatctctactaaaagtggaaaaattagccgggcgtggtggcacacgcctgtagtcccagctacttgggaggctgaggcaggagaatsgcttgaacccgggaggcggaggttgcagtgagctgagatcacgccactgtactccagcctggctgacagagcgagactccatctcaaaaaataataataaaaagaaagtaaacgtagacaggagaaaaataaaattatctatagtcccacccattgttaatattttgatgtgtaccttaccattttctttccctttttcaaaatgacagcatgtatataatgttctatatcatacattttttatgtaattaatttccttttaatatttgtattaataaatttatttcaatgtaagatgcatgtttcctgtttttaaaaaattcttatgcattttatttggtggcattttattttcttccctagagttaaataaaatctatgatgcattggacgtctctttaatagagagaggggaatccttctatcaagataggatgaatgatattgtaaaggaatttgaagatagaggtaggcactcttcttttaactttttattatggaaattttcaaacataggcaaaagtggatagaatttatagtaatgccagcttcatgtactcatcatccaatttcaacagttatgggtactgaccaaccttattgtatctataccttcttacactgcttccctcatataattccatctataatgactttggtatatgtctctgaaagaacaggaccttctttctgccctaaaaccgcaatatcattataataacaaatatatatatatatatatatatatttttttttttttaaaacaatcttgctatgttgcctaggctggtgtggaactcctggcctcaagtgatcctcccacctcggcctcccagagtgctgggattatagacatgaactaccatacccagccaataataatttcttaataccattaaatagagttcaaatttcccaagttgattcatgaatttttttttttttttttttttggaaacagagtcttactctgtcgcctaggctggagtgcagtggcgtgatctcggctgactgcaacctccgcctcctgggttcaagcagttctcctgcctcagcctcctacgtagcaggaattacacacatgcaccaccacacccagctaatttttgtatttttaatggagacagggttccaccgtgttggctgggctggtcttgaactcctgacctcaagtgatccacccacctcagcctcccaaagtgttggattcatgattttttttaacagttttttcaaagtatgcatataacatttgtttgatatgtatcttaagttctataaatctgaggtttctccctctttttaaatttcttttattgttgaagaaactgggctatttgtcctaaataatttcccatatggaactatttagcataattccttgtctgtgtttctctaaagaggcttcattagattctgatttatgttttattcctttttttgttgttttcttttagttgcaagaatgcaggcaatgaggcagtgtctggttgtctctgtttttgtcatattaagattgattagtaaattcaagtatcgtcagctggatctgtccataaatttccccatcagacttttccctattggctttatcagctatttatgaccatgactttgatccaccacttcattggaggttggaaaatggtagtgttctgtcattctttctccatttgttacttgggattctcttatgctgaactttgttactaattattttggttatcctyaggtacaattcatataaaacaggtagggtagtagaagtgcttgatttttttatcaattgcagaataataggtttgttccttagcatctcaaagtgagttgtttgattttgatattattgtggtgggcttttaatgtgttttatatttttcagtcagttgtctttataatttttgtagtgctcaaattgttccattttggctaagtaacttcatattttttgttgtggttttgtttttttcaacccctttggtagttagttagttaattgctttctggtatacaatattccaggcccattttgtacatttcctgcctcagacctgaaatcaaccatatctctatggaagcctgtttccttgaatggragtagtattttaatcacagtctagggcctagggaccatactttttaagatgataaaattttggctgggtgcagtggctcatgcttgtaatcacagcacttggagaggctgaggcaggaggaccacttgaggccaggagtttgagrtcagtctgsgcaacatagcaggaccctttctctgccaaaaaattaacaaaattaacaaaagaagtagttgggcatggtgatgcatgcctgtagttctagctatgcttgagcccaggcatttgaggttacagtgagctatgctcacaccactgcactacagcctgggaaacagaatgaggccctgtctctgaaaaaaaaaaaaaaagaataacgagagagagagagaggtcgagcatggcagctcgtgacagtaatctcagcactttgggaggctgaggtgggaggatcacttgagtccaggagtttgaggccagcctgggcaacaatgtgtgagaccctgtctctacaaattaaaaaattagccaggcgtggctgggcgtggtggctcacacctgtaatcctagcactttgggaggccaaggtgagcgaatcacgaggacaggagatcgagaccatcctgaccaacatggtgaaaccccgtgtctactaaaatacaaaaaattagctggtgtggtggcacacacctgtagtcccagctactcgggaggctgaggcagaggagtcgcttgaacccgggaggtggagattgcagtgagccgagatcatgccactgcactccagcctggcgacaaagcaagattctgtctcaaaaaaaaaaaaagaaaaaaaaatgccaggcccggtggctcaggcttgtaatcccagcactttgggaggccgaggcaggcggatcacgaggtcatgagttgagaccatcctggctaacacggtgaaaccccgtctctactaaaaatacaaaaaattagctgggcgtgttggcaggtgcctgtattcccagctactcgggaggctgaggcaggagaatggcgtgaacccgggaggcagagcttgcagtgagccgagatcgcaccactgcactccagcctggatgacagagcgagactccgtctcaaaaaaaaaaaaattagccaggcgtgatcgtgcatgcctgtggtgacagcttcacgagaggctgaggcaggaggattgcttgagcccaggaggtctaagccacagtgaacatgttcacaccactgcatgacagagaaagacctggatgacagagcaagaccctgtctgaaaaaaataaataaatgcaattttttaaatgtttattttatgagaaaataggcacagagaagttagtatcttcccagggtcacatagctaataagcgatacgtctgagattmaaacctagccagtctggcttcaaagcttatgtttttaactgcttattttatactgcctttacattaccaagcctcaattttctaaactgtaagaaagcatagagttatttactgcayagggttattttgaaggttaaatttaaggacttagcatagtacttggcacatagtagcactcttatatagctgctactgttatcatgttcttcctgtaccttcttgcatccaagaattctgtcttttttatcatgagtgtatgaacatggatttaatttttcttcctacttctcattccaaatgccaaatcctgccctgtttgtttccgggaccttgaaacagtgtcaactacttttcagcacgctgttagagatcactataagaattgcagctttctccaagaggaaggttmtggctccagcttgaaagcaaagcagattttcatgttctggtcctaccgagctgatgggttccaactaaagagtttgggaggccaggcatggtggctcacacctgtaatcccagtacttggggaggcccagacaggagaatcacttgagcccaggagtttgagaccggcctgggcaacgtagcaagactgtgtatcaaaaaagaaaaaaaaaaaaaaaaaaagcagttgggaaccaagtttagtgtttaagtgtggaaaactgccagaacatctgacctgtgctctgatagcaccctgagtatccaggcaaccttgatggttaacattttccaaggtttctaatagatcatggtgaggaaaaaattangtgctntctttagctctctaataaatatatttcaaaatattcttagaataactaaatatttacatagtagaatgagtaagcattcattttccttcagggttcttttaactttattaatgaagtgttttttaccccctaggatttgtgcaggtggatgatggcagaaagattgtrtttgtcccagggtgttccataccattaaccatagtaaaatcagatggaggttatacctatgatacatctgacctggctgctattaaacaaagactrtwtgaggaaaaagcagatatgattatctatgttgtggacaatggacaagtgagtttgtnaatttgtatgtgttttacattgactgattagaggtaagacagtatggtgaggttggtgacatctgacactggatgactgtaaattttccccaaagactaagattcaggacatcagtatagcatagaagaaagaagagggtttggacccagccaaactggacacttcctagttttccagcttgcctccacaaactggaacctctgaacttcagcarttgttcctatcagtagggttattgtgagacctaaaatgtaattgaagtttttgcatgtgaccctgcccttaattcagttgctttaaaaacgtttgaacatagtagaaaatgtaacartgttgctcttagtgtttctcatatatagggaataaaagaagaggttttataatagcacttgtctcacaagatttatgagcgatttgaattttacagatctattcctaagcaaaagagccttaagtcttttttttttttctttaaagaagactagcaagtaactttccgtttctgttgtagtctgtgcacttccagacaatatttgctgctgctcaaatgattggttggtatgaccctaaagtaactcgagtcttccatgctggatttggtgtggtgctaggggaagacaagtaagtctggaaaatctgaagatggtaatgatatacttgatcccaagaggctacttttcatttgataccatattagaattaagaaagtccacagtttcctttagtccacataagctrtaatggtgtaaacccagctgagtgattttgtatctatatcatcactgccagggaatgtagccttttaggtagatagtatgtacaaagtttagtgaaaaccagactgtagacctaatakattatatataaggggtttcctctcccacaaatctaaattataaaatctattacagtacctgctcagatttcagacactattcaacaatatagcttatgcatttgataaatgtttttgttttttccttcaaagttgaacataggcaaaaggyataagttattgagattccaattaagttttaagattcactggttttgttatgttctctccaaaaatattgtttattgagaactatgtattttaatattcatactttcagcttttctattttctaatttttttatattctcaatatttataaaataaaaaggtaaatacaacygtgtttccatacagtattcctcaattcaaaggcacagcatttttcatgttgtaacctcctgtattcactggtgtcttaggatcacttaccaaaaatctgtggcatcttagatttggtaacaaagcctaaatatttccatcctacaaacgtggtcatgcttctaaaaaaccacatgaagtagctcaagatgtttggccagccaatgcgcagaagccctaattgaacatgtaaaaggcagatgagatgtgttaaggtattatcttagatacagattatgtggagctcaaagaccttgttgggaacaacattttctaattgcgtttcttctccgtggatctgcgcttttttgaaatcaaaagacactaggggctaggcaaagtggctctcacgcctgtaattccagcactttaggaagccaatgctggaggattgtgtgagcctaggagtttaagaccaaactgggcaacatggtgaaaccccatatctgccaaaaaaaaaaaaaaaaacttagccaggcatagtggcatgcacctgtaatcccagctaaggattacttgagcatcgacgtggaagttacagtgaggcgagatcatatcactgggctccagcctgggtgacagagtgagactgtgtctcaaaaacaaaaagaataactaagaagacactaagtccttattatagtgtttatggacataaagttttttaaaacaaaccagtaagttgatcattacttaatagtatcttagtttcttaacggttggttttttggacatttagatgatattctgacacttgcttaaaattactagtgctcctattatggcatttaattcacttgtcatataatggctaaaggattcttgataatttttaaaatttttctgcactcagcagcatgtagttatagtatcctatcccacccgccttttttttttttattttttaaattttgggccaggcacagtgtctcacacctgtaatcccagcactttgggaggccgaggcaggtggatcacgaggtgaggatttgagaccagcctggccaacatggtgaaaccccgtctctactaaaagtacaaaaattagttgggcgtggtggtgggcgcctgtagtcccagttactcgggaggctgaggcaggagaatggtgtaaacccgggaggcggagcttgcagtgagctgagattgtgctactgcactccagcgtgggcgacagagcaagactctgtctcaaaaaaaaaaaaaaaaaaaaaaaaattctcacagagggggatgggacttaagaaaaaggtttgttttctttaatgctcacagattctatttttaaatgacattttctgttttaattttttgaatgataatttttttttaatttcatcatcttcctgctattccttgtacatctgtttattgaggatgtgctgtgcatggtgttggttggatgctccacaatgtgtatatgcaggtacacggaacatgagctcctctctgaaagaggctatcatctagagcagagcagtttcctgtggagcttgtgaaaatacacatgcaagccccactgtgggagttactgacttattaggtctaaagggggtattaggcatctgktttttttttaaagctctcrgtattcagatacgcatccctcattgtagagccactagtcagaatagaccaacacaaaaacaaaaattcatggcaggcgcaggtagggagtaactgaaaggaacagtaattgcaaagtagattaaggaaggtttcctttagcattttgactggtcttcatgatgagtttcattttatcagagatttgaaagttgaacacttaagaagaagtgtatgggctaaagaaagctatggaaatatataatgtatttgtgggataataaaggagttttaattctgtataagcagaattttacagggcaagtagattcttgcttgggcaagctctggaaataaaactttaacagaaagtagcacattcattttggtactctttgtgttagaaaagcatgcttcattgttatrtttgagggattttttaaacaccccccccccccaccaaaaaaaggaaaatgatattatatccttggtgttatgtaaacttttttgtttaatacataaaattcagttttctcaaaatgctttttaacagcgactgcccagggcaatgcttattagtgcttttgccatatccgtagtgattctgattgcagtagatctgaacggggccctagcatcctgaggtttttttctcttttttctttctttctttttttttttttaaaggaactggcccaggtgcagtgtctccagcctgtaattccaacactttgggaggctgaggtgggaggatcacttgagaccaggagtttgataggagcctgggcaacatagtgagagacaccatctctataaaaattaaaaaattaaccaggtatggtggctcgcacctatagaattagctacttgggagggtaaggtagaagtattacttaagcccaggagwtcaaggttacagtgagctgtggtcatactacttcactccagcctgggtgacagagcaagaccctgtctctaaaaataaataaatgagtgaatgaagcaagcaagcaactggctgctcaagcatctttcttaaaccttgccaggcgattctggtatgaatcaaggcttggttaccactgaacaagaggaattagtatacagagaaattcaagtgagattttgtcaaagaatttrctgactttctcaacaattctagaaacatatattttgattagtaatttttctaaaaaggtgaaacatctaagccaaacttagtattccaagaaagcaaacaaattaacaaatatcttctttctctgttaggaaacttattaaaggtaaatatgtagagagtgcttttgagggctagagcataggatgctttgagttgagggctagagatgaaagacacttgaaagcacagtgtttcatgtagtactctccttgcttgatgactggcataaggcattrttaccattggcatcaaccctctcttaatagttctcaggggcaatatgtaccttagagatttaaaacatatgttgcagttttgtggtcaggtctctcaaaccttcattttcaaagatttctaagttgaaaagtctgtttcaaaatctgattgggggttttacattttttaggaaaaagtttaaaacacgttcrggtgaaacagtgcgcctcatggatcttctgggagaaggactwaaacgatccatggacaagttgaaggaaaaagaaagagacaaggtaattcaaagccttataggcataatgtgtatcaagcattgtgatttttcatttttgtttttattgagagaactgaggagaagtgtgaggagtcagtcccacctaggacaaggcttatattgctctgactttattgcacagtaagtttattttgtgaattgctgagcatttatttagaaaatatagttcttggcaattaaaaaagaccttggmtttttcctcctttgttaatntagcttagtatccgtgctgcttaacagcagttcccaawgatgggagaatattgcagactgaaggggtttgattcgtcagctcacatcagagtctacatgtgccatgctccttcttgggagcatttgtagagtggtcatagcagtcagttcttgccacccaaggccattgatgaaccttcagagcaggcaacatgatggcctttcatggcacccttagaaaagactatggttcagtttgtgtggaatttggaggaattgaaaagtcaacaagaaaaattttttttttttttttttaagtttagagcagtagaggagaggtcatgcatacctgagactgggtaatttataaaagaggtttaattggctcatggttcttctggctgtaggagcatggcaccaacatcagttggcttctgggaaggcctcagggaacttttattcatgggggaagatgaagggggagcaggcacttcacatggctaaagcaggagcaagagagagagagtagggggagaaggtgccacactcttaaatgaccagatctcacaacaactcactatcaccaagacagcaccaagccataaggaatctgcccccatgatccagctgaatcactggtctaggcacatctggcacagtcagatgaaaagtggtaagttcagtcatctagctgtttgttagtctgcctgatgacaaaaattgctttaactctttttaaccactccagctagtaattttttaagttacttttaattgtgcatagtaaaatgcacagcctaatgaatttttacatatatatgccttagaacaccaatcaagatatatttccatcaccccagagattttcctatcaccataaatcacttttgcttattctggcatttcaaataaatgaaatcacatagtatgtgcccttttccatgtgcatcagtagttcatatgtttttggttttgttttgtttttgagacagagtctcactctgtcgctcaggctggagtgcagtggcaagatcatggctcaccgcatctcgacctcctgggctcaagtgatcattctacctcagcctcccgggtagctgggactataggcacccactgccatacctggctaattattgtattttttgtagagatggagttttgccatgttggaactcctgggctcaagcgatccactcaccttgccgtcccaaagtgctaggattacaggcataagccaccacacccagctgtagttcatttgtttttattgctgcatgatattctgatatatgaaggtgccacattttgtttatccattctcctattgatggacattaggattatttccagttgttggctgttctgaatacaaagctattttgaacattgttgttcaagcccttttagaggtacatgtgctttttctttcggatatatatctaggaatggcattgctgggttgtagggctgrcttaygcttaactttattaaaaattgccaaggagaaagtggtgaccgttgtatactcccactactaacatatgagagtttcattgcaccatatgtttacccacattggtgtattagtcagggttctctagagggacagaactaataggatagatacatataaagggatgtttattaagtattaacttacacgataacaaggtcccacaataggctgtctgcaagctgaagagcaaggagagccagtctgagtcccaaaactgaagaacttggagtcagatattcgagggcaggaagcatccagcacgggagaaagatgtaggccgagaagctaggccagtctcttctcttcacgtttttctccctgctttatattcactggcagctgattagatgctgcccacccaattaagggtgggtctgcctttcccagacaactgactgaaatgttaatctcctttggcaacactctcacagacacacccaggatcaatacttcgtatccttcagtccagtcaagttgacatactaaccttgacaattggtttagtcagtgttttttattttagcttttctggtgagtgcatagtgacttattgtggttaaaattttcattcctctgatgaataatgatattgatgatattgactacctttatttttctttcttttctttctttcctttttttttttgagacagagtctcgctctgttgcccaggctggagtgcagtggcacgatctcggctcactgcaagctccgcctcccatgttcacgccattctcctgcctcagcctcctgagtagctgggactacaggcacccaccatcacgccctgctaattttttgtwttttttttttttttttttagtagagacgggatttcaccatgttagccaggatggtctcaatctcgtgacctcgtgatctgccctgccaccgtgcccggcctctttctttctttcttaagacagaatctcactctgtcacccaggctggagtacagtggcacaatcttggctcactgcaacctccgtctcccgggttcaagcagttctcctgcctcagcctcccgagtagctgggactacaggcacatgccaacacaccaagctaatttttgtattgtttttagagatgaggtttcaccatgttggccaggcgggtctcaaatccctggactcagcaatctgcctgcctcaggctctcaaagtgctgggattacaggcatgagccactgtgcctggcctgactgccttttcttaggcttattggtcatctagataatcttctcttgtgaagagtctgttaactcttttgcccatttatcattattattattattattttgcattagacaatcagtacttacatttatctatatattttcgccctttcctgcagttttttgattccacctgggattatttttccacaatctgaaggtctttatttttttagcacaggtctgctggggtgacagattctttcagaatttttgtttgtccaaaaatgtctttgttatgccttcagttttgcacaatgtttttattgggtatagaattctagtttggcagctgttttctttcagcatttttagagatgacattccacagaactggagaggaccagtggggctgagggaggaaataaataaaaattatactccattgtcttccagctaccatagtttcctttgaaaatcagttgtaagtttcattgtttctcctttgaaagtatgtatctttttctcagactttttttagtatttttcttaggctttatttttagtactttgactaagaaatgcctaagtgtggtttggggagtcatttttgtttttaccctttgggggctgccaracttcctaaatctgtgggttgagttctttcatcaggttaggagaattcttggccctatctcttcaaatgctactacttttccgcattctgttatttttggtactccaagtacatatgttagaactttgtatctcacgtgtttcttatgctctaattcatttttttctttttgctttattttgaatattttctacttcagagaatattttggtattctrtgtttaaggtatttcttgaaatttttcatcttttcttccagttttcttactgttttccttttaattttttgaacatgttaatcatagttttctttaaacattttaaaacggttttagacmtaaaaaagttgcaagatagtacaaagaattttgtatctttcatttagtatccccagatactaatatctttcatagctatatagtatgattatcaaaatcaggaaattaacattgatacaataccattaactaatctgcagtccttattctggttgtacagttggtctcactaatgacctttttctagtctaagatccagtccaggataacatgttacatttagttatcatgtctccttctctttaatctgggcagttagttccttggtctgtctttgactttcatgacctcaacacttctgaagtctgctggtcagttagtttttttggaatatcacttagttggatttgtctgatattggctcctgttctgttaattctgtttccaggttatacagtcttataagtcttataagytgtactctgtttccaggttatacagtcttacaagaatagatgtagagttcttatcagttcatatcaggaggcacatgatattgataagcttcataattaataataataattttgatctctttggtaaggtgatagtatcagttttctcccctgtaaagttagtattttccccctttgtcattaataagtattttttaagtagcttcatcttaaacaatttcarattttaaagttgctattatcttttttcttttgtttctgttgtcttgattctctcctagccctttctttgtagtccccctccttagtatttagttatttcatcttgctcttttatctttttccccccacaagagataggggtctatgttgtccaggctggtttgaaactcctggcctcaagtgatccttccacctcagactcccaagtagctgcgttacaggcatgagccaattacaggcatgagcattacaggcatggctcatcttgcttttttagaaagatttatttgttgttgggtgctcggcattatgaagagaaaattataaagattatggctgaggttatttccctccagagaccgttatgttttcttctagcccacagrtagcataccagctgattatcttgaccctgtttgtattggccttatgcttctttagggctgaactatttaaattttacctgtatgactagggtgaggtccttactcctgaaatatggccctctggccatacttcaatggcgtgtgtgctaatgcccttccattttgccgctgcagaactgccttgtgtcacacagctgctgaaatcactgctcagctctttaattaccatttgctctttcctgatagattttttggagtcttgccttgtgcatgccagccatatgacatttgaaagaaatgtgttcacagagtctttgactcctctgtggctccttctttttggggattgtgtccttgcttctttggcagccccgtactctaaactcttgtcttctcacctcagcaagaccacttctttctgcttgggttctgtcccctttgtccactatgtagtgatttgaaaaatgcccttggggaaaaagccaagtgatkatggactccttcccaatgttttcattcttctaagaactatagtcccttcaactttgcttgtgttgatgctctctagtgacttcaaccagttgtttcatatgtttaacccagcttttaaatagttgcttttggtagaatggttagtctgctgcaaggtattctgtcatggccagaagcaaaaatccttaattacttacttgtggcctaataatgctttagaatacttgagcaaatattagcaaaacagtgaatgggttcttttatctactcttaatacacccttgatttcaattaattatttaacgctaactttttgtttgtattttttggtgttactctgtttcctataacctcacaatgttcatagtatgaagtggatataaactaataattgatgcttctggtttcatatctactgaatacactggaaaaaggtattcatgctgacattttacattttacaaattcagtttctcatagacacattcttcattgtgcataacgcattttatattttcattattttgtttgtacattggcccatgtccttctgcctcagtgtcagtgtttattaaagtttattggtaaaagaataccattagatgttccctaccccagtcttatgcctatgagacaccagggcagaagcagcagtcagtaagctatgaaatactgttttgtttttcccaaaggtcttaactgcagaggaattgaatgctgctcagacatccgttgcrtatggctgcatcaaatatgctgacctttcccataaccggttgaatgactacatcttctcctttgacaaaatgctagatgacagaggaaatacagctgcttacttgttgtatgccttcactagaatcaggtaattgtgggtaggcattgttttattgtgaatcaaatgaaagcatatttagttactcaaaaatattttctttttttttttttgaaatgagacggggtcttgggctcaaatgatcctcccacctcagcctcctgagtagctgggattactgacataccaccattacacctgacttctaaagtgtttttttttgtttgtttgtttatttttgagacggagtctcactctgttgcccacgctggagtgcagtggcgcgatctcggctcactgcaacctccacctcccgggttcaggtgattctcctgcctcagcctccccagtaggagggattacaggcactcaccaccatgyccagctaaattttgtatttttagtggagacggggtttcaccatgttggccaggcaggtctggaactctggacctcaagtgattcacccgcctcggcctcccaaagtgctcggattacaggcatgagccatcacgctcagcctaaagtgttcttttcagacttatttttctgcctacaagcatctttggaaatacgtcctcttttagtattgcaagttatcccagaatccctaaayctggccttaactgcacttgccgatactcttctagatgctctatgtttaaatacctagaaagtgtcacctgatcccctaaaagaattatatttccatttttagtattatgaaatgctttagatctggctattagttttgcctaatagtatatcgtataataaaatacttcattttataggaacttctttttaatcggtgataatttcgagtggagaatgagtgtgcctaaaaaaagggaacagtggtgattgcctgatgatttttttgttttttttaaggtctattgcacgtctggccaatattgatgaagaaatgctccaaaaagctgctcgagaaaccaagattcttttggatcatgagaaggaatggaaactaggccggkgcattttacggttccctgagattctgcaaaagattttagatgacttatttctccacactctctgtgattawawawatgagctggcaactgctttcacagagttctatgatagctgctactgtgtggagaaagatagacagactggtgagtgtctttttttttttttttttttttttttttttttttttttttttttttttttttttttagtgagagacacggatcttgctctgtcccttgggctggagtacngtggtgaaatcataggtcactgaagcctcaaacttctggcctcaagtgattctcccacttgagcctcccgaatggctggacttayacacgtgtgagccactgcacccagctccaagtgtctcatttagtagccatattagggatggggtgccattaaagcatttgaattgtgtgggagtggttttcagatttattttattcatggaaacttccactttttccctaacagttgcacagtgaaccatatcatatataaaagacaaaatgtgaagtagcactttaaaccagaaatggaactctgcccaatcagtctacttttctacaattaggcacatgagatggaaccttaggactccaaagaaaacaattggaagatgactgagagtaggatttttccaacaaacacaatgtgtttgtgggtcccaggaggaatctttgggtgtttttgataatggaaacttcttggaaaacacttgttatcttttcttaccttaggctgtctkccctctgtcatattacatagttaatgaagtagccagaattaatgtattataaggcaagtaggcatttgttaaagtcatgcctgaggactgaaactttattagggaaaaaaatcaccactgtgataatgaggtttatagttatttcagaccgtgaggactaggaaaattttttaaaagaaaggtaaaatttactgttctcatcattgcagaccttatatctcttaatagttaaaaacacatttcttaacagaaatgcctttattttttaaattgtttgtcttcatagtttaaggtaaagaagattctagttaaaacccaaaaacatctgtgggttggactatgcacttctaactaaaatttgcaagtaacatagattctttaataatgattttcaaaaaggaaaacaagttaattaacaacttttttctntcttttcaggaaaaatattgaaggtgaacatgtggcgtatgctgctatgtgaagcagtagctgctgtcatggccaaggggtttgatatcctgggaataaaacctgtccaaaggatgtaatccttcataggtttgaacactgtgtgtttttaccaaagtggccattggcactgtttgcttttttamaatcatgtggacacargcataagtaaagaaaatttgtcaaccaggcaaaatgtggttctttaacagctagaattctaaaaagaaaaaaatcacttccacaaatatgcttatatcttgctgagcattaaaccaaaatgacttagtggaggccatgaaataacaggatttatgcaccacagtgagagtgtattgactttgcaggaatgtggtttattaattttaattagataaggaatcccatttgttgaccctgaaagggccccaagaatttacgcctcttcattgtcccattcatgtctcatttcattgttctgtgagagatacttagcctgttttacaagtaacaaaacttgagactgcacagagataagtaatttgccctggaatcctcaggaacaaaattaagattcacacccgtgcatgtttaaaatcccaaattcaggctatttccattttaagagaaggtgacattggcaatataacagacttgggttcgggggaagggggcaaggaaatgtagactggcaattttcctgaagctcaagattaactcttaacatctcattggccagatgccaatcccagttgcaaaggaaggtagaaacctagagtgaatgtccaagctaagaagaggattgctgtgatttccctagaccagtcacaattcatccccygggcagggcatattgtctcatttcatgaaattggaatctttgtagcagcacagaatatggagattggcagtggcagcgagaggttttggggtacagctccgcacactgattattgagtcagcagttaatggaatctgccaacacaaaactgaaatgagattccatgtaaagccaacacaatagaaaaatgaatgtttaatgagcatgaattgtatcataccatgctgtttctaaaagtctccaagcttagaggaaccttagagaggatcttaatgagctataataatagcttccattcacaaactggtatgtataagtctaacatgtccacattagatcgctgctccctccaacaaacatggggaggctaagcagtttcctctcactctactaactgcaaagacagttcacctagactactgagcccttgggtccgaagactcaggagactttaggaattaaaaacaagattcagccgggcatggtggctcacgcctgtaatgccagcactttgggaggccggggtgggcagatcacctgaggttgggagttcgagaccagcctgaccaacatggggaaaccctgtctctactaaaaatacaaaaaatagccagacgtagtggcgggcgcctgtaatcccagccactgaggagactgaggcaagagaattgcttgaacccaggagtcagaggttgcgatgagctgagatcgcaccattgcactccagcctgggagacaaagcaagactccgtctcaaaaaaaagaaaaaagaaaaaacaggattcagtgaggtggaggagaaaataatgaaagactacaggagtatgttaaattaaccaaaggtcatgataagttcgtatactggaacatcatctcggataccccaggccataactatatctttaaaacactgtcttaccatagtttatagatatataaataccatttaataatacagataatatcagaaacctttccttaggaatagtatagttctgattctcctgtttttgtttatagagacgaggtcctcttctgttttccaggctggagtgcaatggtgccattgtagttcactgtgactttttttttttttttttttttgagacagagtctcactctgtcacccaggctggagtgcagtggtgcgatctcggctcactgcaacctccatctcccgggttcaaacaattctcatgcctcagcctctcaggtagctgggactgcaggcatgcaccaccataccctgctaattttttgtatttgtagtagagacagggtttcaccattttggccaggctggtctcgaactcctgacctccgggtgatctgcctggctcagcctcccaaagtgctgggattacaggtgtgagccactgtgcctggccattcactgtaaccttgaactcatgggctcaagtgatcctcctgcctgagtctgtagtagctatgactacggttgtgctgattagcctgtttttaatgtgctagcctttggaaaagcaaagccagtttgacttcagataatccttaatctcatgtaagtcggtgggcctttgtgaccctcaaatttgccttcatttgacctctaaaaaaagtcaaaataattttttattggttaatagacaaaacacaatttttgccaggcgtggtggctcacgcctgtaatcccagcactttgggaggctgaggcaggcggatcacgaggtcaaaagatgaagaccatcctggccaacgtgatgaaaccccatctctactaaaaatacaaaaatcagctgggcgtggtggcacacacctgtagtcccagccactcgggtggctgaggcaggaggatcgcttgcttgaacccaggagatggaggttgcagtgagccgagacagcaccactgcactccagcctgggagacagagcaagactccatctcaaaaaaaaaaaaaaaaaaaaagaaagaaaaggagaaaaacacaattttcagatgttcactcatttatcctaacaaatgggatgatctttctgtgacctcaagcttatttactgcattctaggaaattacaatactatatatcaatagctctaaacactatagattgcaagatactattgttttgcactactaaaaaattttgacaaacttttaaactgatagaactttcgtaagttagaattttcatactgaaaagagtcttttagacttttgtttgtgtcatgtatcacttatgtacaaacttagcacaggaaaatacaactgaactaaattggttaaaatactcctaaaacttcagagtcccactcttttgagacactttttgatgcagtcattaacatctgtcttttctagacaatatcatcctctatgctaccaaaaacattgatgatgcagcgctttgatgttccactatagttcccaggattattatctgagtcctgatattcatgtgaaggcggcgatgactatgtcacaaccgtcatctgactaataatgactgtgagatgcatcgcaatttcagaaatgttcaaatgtacatcccaaaattgattaaacaccatagtgtgaggaatgaggaaaattaagttggtcagaaaacgtttgacttggtatggaccagtgtctccacgtaaatataaattctcctcattccattctttaatttgcagggacctgtttgctgagctaagatccattacctaggtctctactcagtgcttttccaaacacagggctgcctgaagacttccgtcatccaaagataatctggtttgctggaattcagttactctccccaatcccaccccccccactgagaattctagtgccagtcctaccttccactggcacttcacagggccagtggaatgacatttaaagtgccaaaagggggggaaactgtcaatcaagacctctatattcagcaaagctattcttcagaaaggaaaatggtattaagatgtttctcaataaacaaaaagtttgtcactagaagaccatcgttacaagaaatgctaaatgttgaaatgtaaggaccctagactaacaaaatcacacaacaccagtaaaggtaagtacatagtacaaaatatattttaaaagtgtaaaagattataaaatcaagtatgtagaagtataaaaatcaatagtaatgcattttttgtttttaacttttttcttaaaaagcaactgcgtattaataaactgaagagggaaataaataccccacatgaacatctcaatagatcagaaacaaagttgtccactcttgccacatctacctattcaagatgcctttagtcccagctactctggaggctaaggtgggaggattgcttgagcctgggaggcagaggtcacagtgagccgtgatcatgccggtgcaccctagcctgggtgacaaaagtgagtatgcccaactaatttttgtattgtagagacagggtttcaccacgttggccaggctggtcttgaactcctgacctcaagtgatctgcccacctcagcctcccaaagtgctgagattacaggcgtgaaccaccacactgcacccagcccacacttattcaaataaattttaaaagcagatttaaactagggcataaatggtacagagaagttaatatgcatctacaattttatgctaattttctcatcatttttgactttgcttcttggccaatgtcagcccaaaatggccagtattaacctttctagaaaatcggctaaataatattcagttgatggaggtaattatcttaagtgcaatgagccaggcacaaacaggcaaatatcacatgttctcacttatatgtgggagctaaaaaacaattttttttttgagacagggtctagctctgttgcccaggctggagtgcagtggcatgatcatcacagctcactgcaacctccacctctcgggctcaagcgatcctcccagctcagcctcctgagtagctggggctacaggcatatgccaccatgcctggttaatttttgtatttttggcagagatggggttttgccatgttgcccaggctggtcttgaactcctgggctcaagtgatcacctgcttcagcctcccaaactgctgagattacaggcgtgagccaccgcacctggctggaagctaaaaaatttgatcacatggaggtagagagtggaaaaacagataacagagactgggaagggtgaatgggggcaggagggaagatgaagagaagtgggttaaaaggtacaaacatacaggcctggtgaggtggctcacacctgtaatcccagcactttgggaggctgagatgggcaaatcacctgaggtcaggagttcgagaccagcctggacaacatggcaaaaccccgtctctcctgaacacacacacacacgcgtgcgcgcgcgcgcacacacacacacacacacacacacacacacacagccaggcatggtggcatgtgcctttaatcccagctactcgtggagcctgaggcacaagaatcacttgaacttgggaggaggaggttgcagtgagctgaaatcacaccactgcactccagcctgggtgacagagggggactccatctcaaaaaaaaaagagaaagaaaaaggtacaaacatacagtaagataggaggaacaaattcaatgcttgatagctgagcagggtgatgatacttaataaaaatgtactgtactcccatgatggatactttaaataccgacttgatcactgtgccttatacatgtcacaaaacttctcatgtaccccatacatttgtacaaatcaaaaaaatacttggtcgcattatagaaatttcactggttaatgagagtacatggggtcatctaagtaaaacaattttttgctttgttttgttgcttggtttgctttgcattttcataccagtttaattacataaatatacatggtgcttataaaatgtaatggattgaaggggagcacagttaaactcactgtaatttttgtggggattttagattgtaggagtttgatagcttgtatatatatatatatatatatatatatattttttttttttttttttttttttttttttttttgagatggagtctcactctgtcacccaggctggagtgcagtggcacgatcttggctcactgcaagctccacctcccaggttcacaccattctcctgcctcaccctccccagcagctgggactacagctgcacgccgccacgcccagctaattttttggtatttttagtagagacggggtttcaccgtgttagccaggatggtctcgatctcctgaccttgtgatccgcccgcctcggcttcccaaagtgctgggattacaggtgtgagccaccacgcccggccagaattttttttttatgtattgagatg

SEQ ID NO: 95766 - DNA, 102013 bp, Homo sapiens
  misc_feature (1)...(102013): n = A,T,C or G
gagtattcagcaaataaacagagatataggtgaaacttgaaagatttcaaaataggaagaagcacgtttaccttgaagggaaaaataaatgataaacaaagcaacacagaaagaccaaatcagagtatacaacaatttagaaatgaaacacctattgtgtgaaaacgaccagcaaaaaagctttgggaaagtcactggaattttttagaagcaccatttggtctcatttttagacacaaactagtcacacataaccaaactttgggcacttcttggggtcatcgctgtgattatcagggaaagccagtggctgggccgtcctgcacacatcaattgttagtaaggattatttgcaaattcccacatgggaaattaatttcaaatgctgagtcagaggcggaagttgtccaatttaagagtcagcaagaggtaggaaagtggcccatcagagtcacatctaggaacaatagctgatatccaggaggctgagactctgcttggctgctttttaagaagaaattatagtttatcccagttagtatgggaggttctttgaagaatgccaactaataaatgcagaaggaattatggaattaggaaaacatcctttgcaacccactagatatagtttggatgtatgtcccctccaaaactcatgttgaaatttgatccctaatgctggagatggggcctagtgggaagtgtttgggtcatgcaggcagatccttaagaacagtttggtggcttagtgccatcctgaaagtgatgaatgagttcttgctctattagtttttgagagagctgatttttgaaaagagcctgggacttcgctctcccttgcttcctctcttggaatgacatgctggttcccctttgccttctgccatgactggaagcagcctgagtgaggttctcaccaaaagcagataccagagccatgcttcttgtacagcctgcagacctgtaagccaaataaacttcttttcttttctttttgagacagagtttcgcttttattgcccaggctggagtgcaatggcaggatcttggctcactacaacctccgcctcccagattcaagcgattctcctgcctcagcctccctagtagctgggattacaggcgcctgccaccatgcccagctaatttttgtatttatagtagagatggggtttcaccatattggccaggctggtctcaaactcctgaccccaagtgatccacacgcctcggcctcccaaaatgctgggattacaggcgtgagccaccgtgcccagccttcctcttttctttataaattaaccagactcaggtattcctttacagcaatcaaaatagactgagacatcaataaaatggtttattcaggccagaatcattaatagatgctgaaaccatatggtgaaagattgctgaagaggatatccacttggtaaaaaaaattaccactctagagccaccgcacctggcctggccctacctatttaataagcaaaactgttagatatagcttttggcaaaactcttagggatgctgggaaaaaattactgaggtactaaggatgccatgaacagagaatgtttgggaacctctgtcctaagaccactactatattagaatggaatatactgaatgatgttcatccttctgacctggagccatcaagatcgtattctggctcactgccccttgctccaacacgactccagtctttattcttgatgatttcgatatacacagagatgatctttctctcactctggcccctcatatccttgaacttctctcttccatgactttgtcctcccttgtatctcagccactaactccctctgcaatcttgtcattgccacatgtaatgtaatgttaatacctgactccaaagagcctttcaaacaacctccatgcctgcccttcagcccccgcccattgatatcatctttcagcaacctccacctacccttggcatgtgctctctccccttcagcttaagttccacaatcaatcattatgatttcccacttgcctacaccctcaacttccttgccttcttcttgtttcattatattgctttacagaccccctaccctggtgaaatctagccccctaatttctctaggctgcacctgtacacatggactattgcaagaccccgtgaccacctctcaaacccattctccatgcatcagccagagagactttcaaaactcactttattgcctaaaacctttcaagggttcattgcaccctcagaatacagtcaaaatgcagtaagatactttatggggcctgatatggtttgactctgtgtccccacccaaatctcatctcaaattttaatcctcatgtcgagggagggacctgtaatcccctcgccaccatgtcaaaggacggaggtgattggaacatggaggcggtttcccccatgctgttcttgtgataatgagtgagttctcactagatctgatggttttataagggggtcttcctcctttgctttctcttctctctcccaccaccttgtgaagaaggtgcctgcttccccttctgccatgattgtaagtatcttgaggccccccccagctatgtggaactgtgagtcaattaaacctcagtcctttataaattactgagactcagggaagttctttacagcagcgtgagaacagactaacaccaggcccttcatgcgctggaccctacttgcctccccaacctcccttttcaacatggacccttccccacagcccacaccactctgcactttgcactctgcagtttctaaaatgttccctgttctctctcctttctctgcctttgcacatctcgctccctctggaaatggcatttcctaaccaactggactagtctctcagaacttactgagatgtcacatttttaggaagcctccctgacacctgtcctgtgtgcttcatagattgccctcaagtaacagccctgagcctgtactgcaggtacctgtttgtttgcctccttcactacactgggagctttttgggggcaggcaatgtattttgtccactgttgaccctacagggtctggcacagggacaggcatatagaatgtacatgataactgattgttgcatcatcctaaaatctgtgaacagtgttgcttaaatacagatatatacacctgtccatgtatgtttgaaagagttcagtcatattgtcaaacatgatggtatgtttgaaagagttcagtcttggtgaaccaattccactgccaatttcctaagtttctgtgggtgtgagatcattctgccttattatttcatctttcagcataatgcactgaatccttattacaatcagcacactctttcctatggagtaaatcacatgttattgtgtctacatcagccaagggacttgagtacaaacctctgtttttagtagtttcatgctgtttgtttttggtatttgagagactagatgtaaatgtttccaaggaaagtttactgccagatacagargtgaaaggacagaagtcatgtccttatccatggctgtccctccaaaggtcagtggttggcactttcataggccttttgagatagcagtaatgaaatgaattttaatgaggttcagaaaacggaaataaggtacagtgccccaaagcactcccccaagtgtaggggtccagcgcggccatctctagacccccagagtggcccaaaggtcagcctgactccccttacatgagaaagataatcctatgagaataaatataaatagataagtgggtgaataaatgtaggtgcatgaaattgaaacaagaggacttcattatgtgatggcataaaacataatattctggaatggacaaaaataaaactttggactgggtgaggtggctcatgcctgtaatcttagtgctttggaacacctaggtgggaggttcgcttgggaccaggagtttgaggttacactgagctatgatcttgccactgcactccagcctggacaacagagcaagaccctgtcacaaggatgctagaatttgtccataaatacatttttatttatgtattccccatctctctttttatcctattttatgtagacagcaacgtgattttttttcgtcctttacagaggctgcctactagtttgcagttaataccattttactgtattctataaaggtattgccaaggtcagttggctcaaggtttgtgtttcttccttgagaaaaatacaaaaagaagaaaaaaaaagatcttcggtttgaatacgagagtggaaaagaaaattgaaatacaatcgtgcaggaatgctgccatttagacatttaaaacaagcaaaagaacaacaaccaaaacaaaactcacccataacaaggggttaccactgtttttctgtagcatctcagcagatgacctcctggtgttgcagtcggcaactggtcgtgagtctgttaaaattatgggcaggcacggtggctcacgcctataatcctagcactttaggatgccaaggctggtggattacctgaggtcaggacttccagaccagcctggccaacatggtgaaaccccctctctactaaaaatacaaaaattagccgggcatggtggcgcatgcctgtaatcccagctactcgggaggctgaggtgggagaatcacttgaacctgggaggcggaggttgcagtgagccgagatcgcgccattgcactccagcctgggcaaaagagcaaaacttcgtctcaaaagaaaagaaaagaaaagaaagcaattacgcaatttgttttaaattatgacgtctttgaaaagtatgcaatctaaattcgttggattagcgacgagaatactgaagttgaagtgcatttatagaagtctataaaatggcaaaaaactgaaagggaaagaaatgagctatttgagtattctctgtgttgctagtaaacaagttccaactctgcaaatcagttttcaaaagaatactgattgtttcctaagtacctgcaaactctgaagcattttaggcaagggaatgagtgggaaaaaagtatcttcatgtttgtgcattacaacaataaagactattatgtaacaatgtggagtcttcaaagcgaccctgccaagagggagaaagtggtccttatggacggattgttttctgctagaaggccctcaattagaattgtacttacgcatacataatataggatattatttttatattcatagaaaactgctttctcgggtaactccagcgctgtacatgggatgggataccggccctccgtttacaaatactcaggcgcaatgctgcccgggcactcaaaggacagaagatagtgtctgtgccctgcgggagcaggccacgaatcccgaaaacgccgtggcgcagtgctccttcccgcgaacctgagtgggccgtggttctcggttgctctggacataggaaaatgtcagttcatgtgtgtccctttctccactagatgtcactgtaaatcaattgcttaaggagggaacccgggcgtctggcgcatcttcacacagtaccggggtttgaagcccggtcagtgtctgcacttgtgtccttccccactggggagccccaaggcggggcaggcgcggggactcgctgtgcacggagcggcgcgctgtccgaatggcaaccgaagagccgcgacccggtcaacgaagcgcgggggtgaccggagcaggacgggcgggcaggcggcgcagtgcgtgggcgggcccgcgctgcgctcccctccgcccagctagcgagacggtcacgtgccgcccaggcgctgccccttgcgggcggctgcagaacaacagggcggggccggggaggggaggaacacggaggccgacgccgggcgccgcggtgctacgcccgaggctggggtcgccccgggccggggggagcagagcgcgtgcgccgcgcggctgtgagcgcgagcggggccggggagcgcgcgcggaacgctagggggcgtggctgcggcgcgcgcgctaaccggagggggaggggcggagagccaccgcggagcgcgcgcggggttggttgccgcgagcgtgggggagcgtggaccgcggcgctgctcagcggtggggctgccttcccccggccctcctccctggtccctggcgagggcactggcggcggcggggccggggtccgcaaggccggagaaggccgccgggcccgggcatggtggtctggggcaacgcggaaggtgagcgacccccgggccggcggcggggtgggggaggggcgggatcggacacgcgtcgcccggaggcgccgcagacccgcccggcagcggccagagcgcggtcggcctgaggtggcgcgggggaggggtgcgtcgccccggccccggcccgcggccgtcctgtcgcggcctgggctgtccacggcgccttcccctgacgctcgcagccgccgggttatgtaatgtgtgacctcccctccccttcccttccgtcatggcgcggccggccccgcgccgccgccagccccatgggccgccccgcgccgacccctggcgcagcggcccttccctccgcgcccggccgcatcccgccggcccggtcagaccgcgccgcaaactccttcctcctgcgccggcgcctcggccggccattcagttccgcgccattcattcacgcgcgcgttcgggcgttcgttccacaagcgtttgtagaatgtcgacccggtcgagccgccgctcccaccmgcactccagccacagcgtttttccgcaccccgccttcgacgtccccggtgcatcccagaaccggtcggaatgtccgaaggcggttgttgctcccttgtttttccttgctgcttgtccgttcgctaaatacgctgggcgccgttccccaactgtccttccgagagccccttgcccacttctgtactgttacagtgacgccgctctgggcgcaccgagccgcgctgtgtttcgctgctcttcctacctattctcagtttgtaaagaaataatctcacataacactccttaatgtactcctccgtaagataaattgcagataatatacgtctgctaattctctttatctccacgtcttctcacgccatgtactaagtagaaatggtttcatttaggtgaaaataatgcagactagcacatagcacaacaagggcttgtaactattaaggactttatgtaacagtctgtaattctgtgtatctgtctggtctttccggacttggcactttagtctccgagaataagccatttcctgtttaggtagggtaggaccaaccataaccttggttctttctatggagttctgtatgtagcaaatcagcctgtgggaaccatctatctgtccaccaacctttcacacatattcttgggtttgcccgtgcagggaccagtgctgcgtattgttccctgccttcctgtactggacacttaagagctcacctaaagttcctcttccaggaatcattctccagtatacaaggctctcttccattcaattcttaggctatttgcgccttttcctgtgttgcgtttatctttttagccctgtcttctcttactgtgtaggaccttttgagggtagagtctgtaccaaactcctatcttttgttgtagaaccttaaccgctattttacggtaaaccgtacatatttaattttttttgtaaagatgggaattgctcttttaaaattaatttctatgaggtctcaagtagaacataatttttaaaaaataatgtgcttgaatatataagatcactacatttccaacttcccactcgcaacttcaaaactctgattctacataagagcattaaggaaacgttgtcctcaccagcaacaaactggtcattattcataagaagttgcagtgactacatataatatatatttgaaagcactttctttgatagctgctgtagtggaaagacaggaagttcacagttacatggaggttagatttctggccctacaaattgttagctggtgactggacaagttaagttactagtatctctgattttttctcgtttgtagaatgaagataccatttcccaccttgggtagctgaggattaaatcagttcttaaacgtgagacatctagtgacaccatggtactcaggaggtgctcagtaaatacatattccctttggtatacctgtttattgcagttcacaatctagaatgagccaggatgtgctagagacaaagcgtgagaggaaaggtaatcagaagaggtgacaggtacctctcgtctccaaataaatgaacaagtcctacactaaagagcattgtgggtctttctgcttttcaagaatgtatgggtgtgtatatgtggcgtattactaatcatagagtatattaaacagaacatttaaaaatgaaaagtttttttttactataatagcaccaactgaagcgttaacatggacattaaaaaataatcttatttttttccaaaggcaagtcaggagacgagacgggaaaagggatattaaaaaggctctttagaggcaattaggttgcaggctcttctgttagcatctacttataaacagtacatgaatcctagtctaagttccattatctcttggttggagtgtttccatagtgcctttactggtttatttctcttgctccctgactgttccctagggattcaccttgacaaccagagggatctttttaaaaatgtaaatcagattgtcactttcttgcttagtgtcctctaaaagcatcctgtgaaccacttacatttgaatcttagtcgccatcagggcatagcatgatttggcagctgccagcttctaacgttacctcttactaggtgactgactttcagcaacctaccccagtcccatagtcattttgccggttcttgaacaaagtgtttcttccttaggatgttatacttactattcttttagctggaccaccccttcctctaagtggtcaaggctcttcatgtcttgtcttgtgtttctgctcaaatgtcatcgcctcaggccttttctaattctaaaataggaaccagccccttcctttataatcttttattctttattctctttttctccatagcatttattactaggtgaagatacactgttttttttttcccacttatttatttccccccttagacttgtttgctgccagccctgttctcaacaagcgagcagaggtcttgtctgacttgtacacagctttatccccagtgcttagaactgtgcctggtacatagtaggctgtcagtaaaacttgttgagtaaatgaatagtatagttgatttaaatattggctctggaatcagacagctagggtcagaattctctggctcccaccatttactgattgagactgtgggcaagttaataacttggtggtgcctcagttctgctcatctgtaggatgactgtaataatacctacctcacaggattatggtgagtaataattgagttaatgtatgtaaagtgcttagaacagggtaattttttttttttttgagatggagtctcgctctgtcgcccacactggagtgcagtggcaccatyttggctcactgcaagctccacctcctgggttcacgccattctcctgcctcagcctcccgagtagctgggactgcaggcacctgccaccacgcccggctaattttttgtatttttagtagagacggggtttcaccgtgttatccaggatggtstcggtctcctgacctcgtgatccgcccgcctcagcctcccaaagtgctgggattacaggcgtgagccactggtcccagcccagaacagggaaattttaaaccttctaggaactatttgaaattagcttgttcacttaggattttgtattttggcatgagataaaggtgggttaattgaatttttttcttttttaacattttttgagacagggtcttgctctgttgcccaagctggaatgcagtggtgtgatcacggctcactgcagcctcaacctcctgggctcaagccagcctcccgcctcaggcgctcgagtagcctgcactacaggcatgtgccaccatgcctggctagtcttttaatgttttgtaaagatggggtcctactgttttgcccaggctggtctcaaactcttgggctacagtctcctgcctcatcctcctgcctcatcctcccaaaatggtgggattacaagtgtgagccactgtgtctggctaaattttatatttattactttggtgctgaatttttgttagccaccaaaattgtatttatggaacgcctttaaaaaatacattttgtggatgtctagagcaaattaaaaaataaactgttgagaatggtgactggtgtttggtcttaatgtgtaagtcaggttttttatttttcaatctgtagaagatgctaagagtgattatctcaacaaccgcccaccagagtggcttttatagagttccctttgaagttcagctggagatctgattgtggtgatgaaaggacttgctggaggcttcgtgtcttcagacaggaaagtccttgaagatccagttgaaatatgagtcttgtagtatttgggaaggaaatttttatcatctttagttgtgttcagtttctcccttctttcactgggtttttcccctcagattatatttggttattaattggaacttaaagtaacccagctgtgctctgtatctttctgttcttttcataatgatttatttttctttagcagatacagaaataagakaagaaagaattgatggagacagtgactttgtaataatagatattttcagctaatacaacttgaattattctcataaactaagattctgcctgtggtaattgaacttgcataataccagttattttaaattcacttgtccttagtaaaatgcttctttgtaggattgttatttcatttctcagtctgaactttaacaagtaataggatcctaaaccctaggtgtaaatttttttttaaaagtcaaagggctgctgctttgtgtaacatttcttccaaaatttaataattgtgagttattatttactgtgtgctaggctctttcctaggtgcagtgtcttaattaatatctacagctaccgtataaggttggcaccattataaagaaacagatttagagaggtgttgttatttggctggttacacaagaaaggaggcaagatttcaggccagttcccgaggtcataaccggtctgctgtgggacaccttaaaatgacaaggtttttgtttggaagcttgccgttaaatttatctcattatttgtgagtgtgtgttgttaactactggcagcttcatcattatttatggctaattttttgttttttttttagatttaactactactactatacttaaatgcttgtattataagtgaaatgttttaataggatgatgacttgcatcgtaattaatgtttttctcattatatttaaaagtcattaaaaataagtcaaagaatcatgtgtcttggtgcttcagctttgtaaatagtttgaaaaggttttgcatataatacattagatttaagaaaacataaatgtcttaagtttgctcagggctaaattggaggtagcaagtaaatatttagtaaaagttactagtgatgtgtttcctgctgactatggggcaattttttttttaaacttctatcttaggttctggggtacatatgaatgtttgttatatagataaactagtgtcatgggggtttgttgtacagattgtttcatcactcaggtattaagcctgatacacaatagttactttttctgctcgtttccctcctcccaccctccacgcttaagtagactcagtgtctattgctcccttctttgcgttcatgagttctcatcatttggctgccacttgcaagtgagaacatgtggtgtttggtgttctgttcgtgtgttagtttgctaaggataatagcctacataggagatctttacctggatctccttcaataaggaggaacacataggtgggatgtttttacataaattttaatggtttctgacatttccttgcaaggcttttttaatttgtaagaatatctaaattatgagttattggcttctcaacacctcagaatgtcaggggtaggaagaatcttacagactccagaggcaatgccattatatcttactggaggaaagtgagaccccaagagtcatttgcctgctaaagaggagaaataagatgagaccctaggttttccccccaaggccattttttccccctgctacaccaaactgttccctgcattactgagggaaagaccagcaacacttagtatctcatattcaagagggtggaaaataaaacgatatgttcttgtaaaattacgatttaaagtcttgattttatcattggaacataatagaaaaaaattttgtcctctattataatgcagttgaaaatgatactttctcatataggcaggagactgccttatccacataggatgctttgagaaaccttttaaagactagtcgggtcccatggctttgtgcttgaattaaaatattaggtagtgatgggcaaaaaaagttggttgtgatgtgagtagttcgtattcaaactcatagcctattaagcaaagtgttgcttactgacctcagtcattcctgatcatacccaaggctaaaatgaactttttggaggtttagtcacaaaataatggctgcatcttacattctctaagctccatcatttctacatttgctatttctaggaatggacttaatgcatttttatcttttaggcactggtctgagttatgtagttgaaactacttagattttttgctcttttaaatggttttcattaagttctgtattttactcataataaattcaatttcttgatgactccttagctttttattttaagcctttttttttaaagcatttaacctggacagttctgaactttacaaatgttttaacaatttcttcttcaatatcttaaagaccgtaacaaaaaaaaaatttttttttttttttttgaaacggagttttgcccttgtcgcccaggctggagtgctatggcatgatcttggttcactgcaacctcctcctcccaggttcaagcgattgtcctgcctcagcctcccaagtggttgagattacaggcacctgccaccacgcccagctgggttttgtatttttagtagagacggggtttcaccatgttggccaggctggtctcgaactcctgacctcaggtgatcccgcctgcctcggcctcccaaagtgtaaattttttaatacagaattttttctcatgataatcttctctgtgtcattccaattttagtgtatgtgcagccgaagcaaacacaacgttttatatcttaaagagtgcttttacctaacttttttctcatttaattctcttaagagtcctgggaagagaagtaaggcagcatatcctattttatagctgtagtgtaatttgggcacctgctacccagagttaggtaaggcatcgtaagttaagggtacagtctgcaagactctcctcacttcttatattagctacaaactccaggacttgcaggttatccacactctgaccaactggctacaactttcggagttcccactacacctcacgtttgataatttggtagaatgactcgcagacctcaggaaagtgctgttcttggaattacagttatgatacaaatcaggaccagccaattaaagagacacatagaacaagatctgggagggtcccaaacatgaagcttccatgtcctcaggacgtgtcatccttccagtacagcagtgaatgattgccagccaggaaacctcacttactctacagcatctggagtttttatgggacttttattacataggtatgattgaactcagtccccagtccccttctccctggaggtcaagttgttaggctgatgtcaggttgctcaaagcccaacccactattcacatggttggcatttccagcatggccaggccccatcctgaaactaggggcctactgggagtcaccctgttaatagaaactcagctgtgggccaaggaggacccattatggattcatggataacaaagacactcctatcagttgggagactccaagagtagagttttccaggaatcagacaatggccagtcaaatttttttgtttttgtttttttagggacggggtctcactgtgtcacagtggtgctatcatagctcactgtagcctccagctttcaggccaaagtgatcctcctgcctcagcctccccagtagctaggactacaggcacacaccaccgcacctggctaatttaaatttttgtgtgtgtgtgtgtgtagggatctccccatgttgcccaggctggttttcagactcctggcctcaagtgatcctcctgccttggcctcccagagtgctggtatacaggcatgtgccactgtgcctgggccccaaattctttattacacaatgctggctaaagaagtgagaacagacacttgctcaatttatgacagctaaaactagtagtagtgatagtaacccagttacctctgttgtattaaaaattggaacaggttgcatttgaatatggatagaaggattgccttctgttgagaattactacataacattttttttattgatacaatataatttaaaacttgggttattcacttgagttaaatgttttaattacataaattttgtagcttgggttataaactgtatacttgatactttaaagcttaataattggctgtaaaaaatctgaattttggtattggtcttgaatttgtacttttagatgtacgtaattattcattagttatttggaagaagaaattatgaagtgagatatttatgggtagggtggaggcattgataatctatttgtgttagggttgtaaaatgtttcagtaacttaattgctgttttgaattttagcacttgagtcaaagttactaacacttcaagtttactgtgttggaggttaatattcttttgcatattatttatgcctaatcttatttcagattgtcacttgaagattatattgaattatcttggaactcactgttcctcagagattatagtgtgctaaattgttacattgaataagacttctggtgtcttgaagaatgtagcatgttgtaatgtttttgtttttttaaaagtatataattttaaatatattcttggtgtaagcaagggaaaattccagaagcagtgacaacttctgcttcctttatgtttatttggaattacatttaatagaagcatttgtgagaaaagggatttgtgaatgctggaactgatagcaggtccagaaaaaaagagtttgactatatttttgaattgcagttgctctgagggatttgtttttagttatgtgtcattgtttatgccagttaccttgtgagttcagagatctaatgacttgtgtgggtggaatgcacaaggtgaggacttctgctaagatttatacgttatggtgtaggctaggctcaggagccagaaactctcccacccaatttacacttgcttaaaacttacaaagtaaggtttaaacttcttagtatgatatattcaaggccttctgttatatttctccacctaccttagtttgtctacctctacatctggccatgttcctacatactggtaagttctagaatgttgtcctaaacatctttttgtattttttatgaggcagagtcttgctctatagtctaggcctgagtgcagtgacgtgatgatggctcactacagtcttaacctcccaggctcaagcagttctcccatcccactctcccaagtagctgtggccatgggcgtgcaccaccatgactggctaattaaaaacaaattttttgtggagacaagggtctcacttcattgcccaggctgatctcgaattcctgggcttgagcagtcctcctgccgtaaccccgcaaagtgctgagatacaggtgtgagccactgcactcggcccttttatgtttttaattatgaatttttcttcttcctgaaatctttgccttcatgtcaccccttcccacctaccttctatcctaccttctatcctgtaaaatcctactgattgttcttagttcagatctacctctcagtgatgctttcttgggtgtcttctcgaacatgagatttatggctgttttctctgtgcatttattgcattccattagtgcctataatgcaggatcttgtattattattattattattattatttttacttttttggtcttgttctgtctcccaggccaagtgcagtggttcactgcagccttgaccttccaggctcaagcgatcctcccacctcagcctcctgactacaggtgtgtgccaccatgcctggctctttttattatttttattttttttgtagagatgaggtcttgctgtgttgctcaggctggtctcacgcaagagatcttcccaccttggcctccaaaaatgctgggattacagatctcatattatagttatatgcaaatctctgataaccttggattgtggtttattctcattttactcaccttgaaaactatagattatagtaaattctaagtgaatggagaaaaaccattagctcagacctggaatttggggtaaggggaagtggggggcaggacaggcgagattttgttgcctgtaatctttttgttttttttttttttttttgagacagagtctcgctctgtcacccaggctggagtgcagtagcctaatctcggctgactgcagcctctgactccctggttcaagcagttcttctgcctcagcccccaagtagctgggactacaggggagtgccaccacacctggctaatttttttatttttagtagagacgggatttcaccatgttggccagtgtggtctcgatctcctgacctcgtgatccgcccacctcggtctcctaaagtgctgggattacaggtatgagcaactgtgcccagcctgtcgcctgcaatctaattaaaaccttcacctggtgaattgcattactcctgatgtgaaattcattctacttaggacacgttgtagcatcattctctctactgtatataacctttctcgttaccactgaactgtccttttctctattatcaccactatagatacatttttaggtacaggcaaaaccagtggttctcaaagtgtgtgccgcagtccagctggaaatgcaaatttccagccctgccctagactcactgaatcagaaacgttggagttggggcccagcatcttgtgttttaacaggccctgtgctagtgattctgatgcatgctcacgtgtgagaattactgctttagatatatttccctcttctttgatattatttcctttattcttcagctaagttctgttcttcctgttactagctcttctgctgtggcctttggaatccctgatttattgcaaccttgaacttttctacagataatcatttggctttcctgtgagattataccacttctccttagtgaagatcagtggcttcttcctccttcctctagactcttaatttttatcatgtcatctctagaacattcttttgtgttccttcgtagcttgatcctgcttatggacatgctgactttgagatgtgtagaacatcctagtggagatgcttaataaatgcaattgggccatgtggtttggaacacargaaagcaggaaaattgaggggaaggtgtttggaaagtgggtgatttggccgcactctggaaaactagagaaggcagttctctttggtactttctattttttatttttttgagacagagtctcagtgttggccagtgcagtggtgtgatctcagtttcactacaacctctgcctcccgggtttaagtgatcctcctgcctcagcctcccgagtagctgggactacctacaggtgtgcaccaccacgctcggctaatttttgtatttttataaagatgggattttgccattttggccaggctggtctcgaactcctgaccttaggtgatccacctgccttggcctcccaaagtcttgggattacaggtgtgagccactgtgcctagcctcctaggtactttattaaaacagtgtctctacttctttccctttctatggaaatctgtaattgaagggaagaaaagcattagtcgttgtttcaggaagcccccttcagtttgtattaactattgattttgttaaatcaagcatctttttttggtagttatgaataacaagaagaataagagaaaactctttgttgtattgaattgtttgggatagacgctttccttttaatcagatcagcctcaaactgggacatacaaatgtttgttatacattttcaggtttaatatatccaaatattttttatacagtacatcttattgtttgtctatttttaatttatatagatattgaatcaaaatcatattaaaatgctcagatgtacttatgcattagggtacaggctaagctgctgtaacagggacttcagaatacaatggaacaaacaatttttaagtttttctttctcctgtaatagtccagaggtagataggcagtccgtagtaggtgagcacctcagtgttttaggggttccacagttctctgtgtgcttagcccttccatagggtattgtccttattcccatggttgaagctgggttacctcacaactgcatcccagaaaaagaagtaaacagctttctttaggaatatggttcatatttttgtacacatcactctgctcatacctccttggccagaacttagtcacatggccacccccgattttgagaggagcgtgggaaatgtagtctctggttgcccactctgcctcctgctaagaggggcgggagaggtgttccattactaaaagtaagaaagaagaatgaatactggaggacagtgccgttttgccatcgtggagttgggggtcccaagaccaccctcacttatgagatcaactgcaagtttggggatccacaccatccttaggttaaataattggctagaagggttcaaagaactcctgaaagggcttttacttatggttggatttattacagtgaaaagatacagaataaaatcagccaagggaagaggtgcatggggcacacagaagagtccacttacgaaacttccagttatcctctgccagcgaagttatggacggtgccaacttctggcactgatgtgtgacactactcatggagattgcctatcagggaagctcacccaagccttggtgtccagcatttgtactgggacttggtcacttagatatgattgactgttggcatggttgacctttagttttcagcccttcaggaggttgataatacatggctcaaagcccttcaccttaaatcacagtgcaaaactatctggagtggctcaaagcccccaggtaaacaaaagcacttaacagggtggacattattattattattattattattattgacagattcttgctctgtcacccagcctggagtgcaatggcgcaatctgggctcactgcaacctccgcctcccgggttcaagcaattctcctgcctcagcttcctgagtagctgggattaccggcgtgtgccaccatgcccggctaatttttgtatttttaatagagatggggtttcaccatgttggccaggctggtctcgaactcctaaccttgtgatctgcccgcctcagcctcctaaagtgttgggattacaggcgtgagtcactgctcccataaggtggacgttctaagggcttagaggttacctcccagtctcatcttggaccatgtgaagggggggaaaagaaaggattacctcccaggaaccaagggcaaaggccaaacatctgtttgggttaggattcttactgcacagccacatctgtggataggtacatcttgttgttttttggcaagcatagaaaaagttacgtaaagttgcataatatgtatgtgtttgttgaaagcgtttttaaaactagatgtgtagaatcatacacatttgtttattttcatttatttatttttttgagacgaagtctcactctgtcacccaggctggagtgcagtggcatgatctcagcttgctgcaacctccgcctcttaggttcaagcagttctctgcctcagcctccggagtagctgggattataggctcccaccaccacgcctgactaatttttgtattttttagtagagatggggttttaccatgttgaccaggctggtcttgaactcctgaccttgttatccacccacctcggcctcccaaagtgctgggagtacaggcgtgagccactgtgcctggcctatttattttttttttgagacagagtgttgctttgtcacccaagctgtagtacagtggctcaatctcggctcactgcaatctctgcctcctgggttcaagcgcagaatcatgtacatttaaaaaattgcaaaagactctagaatttgtcaggtctgtaaaaagtaaaagtagatgtacctcttcaaagactttcctccccatctgattagaaataaatagtaacttctcttagaagcaaaatttattcaaagacctgtgctcctaaatatttgccctggcatgcttatactggtccaagcaagcattaggtcatatcctgttctcttccttatttaaaagtgtttttatccttctcagcattccacaagttacttcctccttcctttgttctcctccacctttgcctcttttaaaaagttctaagttgctagccaatcggaacaaatacagaatgtgaggtcccgttccagccaatggaaaccagacacagcagtatgatggacgcatcaggttataaatgaccctgtctcctttgttccttgtactctcatggcaaaactgctggcgagtgtaccttttctgcaggaaataaaaatggccttactaaataaattaaatttatgttcaagtgctgtttctttatggcaccggggaacaagcatttcaaacaggtccaactctttccacatacggaggaactaaaatatgactgattatgacttgcttaagttcagagaaccggttagcaacaaagttgatgctgtctttgaatctctacttcttttttttttttcttttttgaaacggagtctcactctgttgcccaggctggagtgtagtggcacaatctcggctcattgcaacctctgcctaccgcgttcaagtgattgtcgtgcctcagtcccccaagtagctgggattacaggttcctgctaccatgctcggctgatttttttctttttaatagagacagggtttcaccatgttggtcaggctggtctcaaacttctgatctcatgtgattcgcctgcctcagcctcccaaagtgctggaattacaggcgtgagccatcgctcccgacttctgcttatcaatatggactagttggggtctagatggagcttaattgtaggacctgttttcttccttagttttgttacatatatggctctattatgatccagactgttgctagattacctggtgaagaagcatctgttttgttgaattgtgttaggttacttcagatcaataggagtattcttaactttttagcagttcatattgataccattattattttttccattgaagatttgggaacataattttgtagaagatgagtatgattttgtaccacaagccagcagtgcagccttacagaactttttagcttctctaccctagaagtcaactattgtgtgcaaaataaataggacttggctgactcactctatggatgagttgtaaagataaatggtagatgtaaaggggtcttggaaaactaaggatacttcagaagtkaaaggtattactagtaatgtgaaatgtaaataaattaaatttgaatgttaaaaattaaaggaacactaaaaggaaggaaatataaagtgtcagttaataggtgaatttttttaggtggtaggaatttgggtaattctttccttttctgttttctgtattttccaattttctgcaataaacacgaattgcttttataaatagagcaagaaaaactatttttgaaaaggaacacctagcaggattgcatactgtacttagcattacaaagcagtgtataaacacaagtcagtgatgaaggaataatagagaatgtcccaagaaaagatggaaagatcatacttacttcaagaaaaggcttatgtaccaaaacctgtaattttttctgtggagagtgctgtgtgccactttgatagattgaagttctttgaattctgtgtttatcaagatagtatctcatctggtacagaaattgttttattgcagcagaaaaaattagcaacaggaaaatgtttcagtatgctgaaggtgtaaaaaaaacacayaaagtggcaaaaatgggttttattaggttaggaataaagcctgatctaaatatcttagacttgtatatttttaaaagatatcttaaatacatgaaagacacgcagcactatgcttagaatgtgaactgttggcttggtttagaatcagtcgctaaaagcaagtagaggtttccagagccagtacttgtacttctgggaaattgtgcccttcacctaggtgtctgaatttttttcttttttcttttcttttcttttcttttttttttttttgagacagtctcgctctgtcgcccaggctggagtgcagtggcacgatcttggctcactgcaacctctgcctcctgggttcaagtgactctcctgcctcagcctcctgagtagctgggactacaggcatgcgccaccactcccagctaatattttttttggatttttggagacagggtttcatcacattggtcaagctggtctcaaactcctgacctcaaatgatctgcccacctcagcctcccaaagtactgggattacaggcatgagccaccaggcccggccttttgttttgttttatataccttggtgagagtcccttcaagatcaaaacctgactagtttgtgggatgtgcatgtctgtagtgcccgtacaacttcagcaattgtttgaaaactgtagccgtagacaatgatggtctgtaaggttgaatcaaaacaaaacccacaaacagctgtatttttatatctaaatgttacataaaaagctgtttgtgctgttaaaacttttaccattaaaggacagaataagagcacattggagcagactgttaccaaactttttttagggcatgcgtgctagcactttatgtacttagtcactcataaaggcaatacytggttcttgtaaattctacaaatggcctcccactactgccaattcaaagtaaaaaacaaacaaaacacccaggtactgctgtacagatttcttgaagtagcctttttcccagctttgcaccccacctgaagatyctgtccactgcagcttgcaggtgcctatacagtgtttccagcttcagaactacttttttaaaaaactcttttcttcttaattgtggtacgatacatataaaagtttaccattttaactgttcagtcacattaagtacattcacattgttgtgcaaccatcaccactatccatctccagaactcttcaccttgcctgagactctacctgttaaacagtaactccacccgcaaccaccattctgctttctgtctctgaatttaactactttaaatacttcatataggtagaatcatacagtatttgtctttttgtgaatggtttatttcacttaccataatgccttcaaggttcatgcaagttgtagcacgctttggaatttccttccttttaaggctgaatagtatttcgttgtatgtatataccacattttgtttacccattcatctgtggatggacacttgggttgcttccaccttttggctattgtgaataatgcttattaatatgaatgtacaaataaatacctctttgtgtctcaggtttcagtgcctttggatatatactcacaagtggaattacatgataattctatttcagattttttgagtaactgccatactgtttctcatatcagctgcaccattttatattcccaccaacagggctcgggggcccaatttcttcctatccttatcaacacttgttttttttttttttttttttttaatagtagctatcctgctgggtgtgaggtggtatctcattgtggtttctatttgcatttccatagtgattaatgacactgaacgtttttttgtgtgcttattggccatttgtctatcttctttagagaagtgtctgttcagatcctttttttatttcttagtggcgttgtgtgtttattattacagtttatggtaggagttctttatattggtaagtgtatgaaccccttatcagatatgatttgcagatattttctcccattctgtggattgccttttaacccttttttgccctgtgattcacagaagttttaaatttttatgtagtccagtttatctgtttttttctgttacattttccccaaaaagtcattgcaaaatccagtgtcatgaagcttttatgttttctcccaagagtttgatagttttagctcttatatttatgtcttttgtacactttaagtttttttttaacatggtgtaaaggtccaacttcttttgcatgtgatatccagttttcctatcaccatttgttgaaaagattgtcctttcctcattgaatggtcatgaagaggttcttttaaacacagatgaccctgggttggatcataccttaagccctttattaaccagttccttagttgtcaataaatgccttagcagagaattgacagctaagtaagataaagaggcactgaaaacagagaggtgttgagtagagatatggcagggcaccaaaggcaaattgtgtttcaaccttgcctagataaggggtggccacaggctgctttctttgcatttgtgtcatattcatgaattatgttatgctactataatgtgcacattcattcattgcatattctttgcatgtcaatttgtaactacattcagtaaatatttcttagataactattacataaagataggataaacctctttggaatgcttgttccctggtgctgtaaagaagtagcacttgaacataaatttaatttcctcagcaaggccatttttatactttctgcagaaagggtacactcgccagcagttttgccatgagagtacaccgaacaaaggagaccgggtcatttataacctgatgcgtccaccctgctgctatgcccggtttccattggctggaacaggacctcacattctgtatttgttctgattggctagcaacttagccaatcttgttttaaaagaggcaaaggcagaggagaacaaaggaaggaggaagtaacttgtggaatgtagagaaaggtaaaaacaccttcaaataaggaagaggaacaggctatgacctaacgcttgcttggaccagtataagcttgccggggcaaatatttaggctaaattgtgggagctaagaacataaagtacattgatttctttattacggctagcagatgtttaagaatgttagcacaggtstttgaataaattttgcttctaagagaagttactatttattcctaattacacggggaggagagtctgaagaggaacctctactttgctttttacaaatgtatacatttatatatgactgtattaataaagactgattaaaagccactcaaaatgaatttcattagttaatcaacagactttagagttacagatatgtaaccatcagattaacactgaacatttgaacattttgtggatatgtagtggaagtttttctagtgtgtgatgaactgtttagaaccttgtaatgctagtaattattttgtaaatagatgaaatatcttttttttttttttgagatggagtcttgctctgttgcccaggctggagtgcagtggtgcaatctcggctcactgcaagctccacctcccgggttcacgccattctcctgcctcagcctcccacgtagctgggactacaggtgaccgccaccatgcccggctaattttttgtatttttagtagagacggggtttcaccgttttagccagtatggtctcgatctcctgacctcgtgatctgcccgcctcggccccccagagtgctaggaaatatcatttttacatgaaaatgaatgttcctggtgataaacataattctcggggtagatagtaaaatctaccaataactatagtaaaaagaaagcagaataaagtttagaatgaactgatagtagtgtgttccagcaaaagataaaacattaggaaaaatgcatgcataagtagtcttgttatatttttaaataagcatgtccttgatgagactcttgatagagttttgaacatccctattgagagaatggaaagaggaagtcttgtgtaggcattcaggatccctgggctcctcatagacagagctgctctcccatttgccttaaccttacctcacctggctagttgttactgcatgttagcactggggactggacatggctgtattgacagcctgtaattcagttggtctttataatttgattacttgagttttagctggtaggtgagttttagcttgtgaacctttcgagggttgggagatttccacatgtgactgtcttacagagtcacatggaaacagaaaagaaccaagaaattttgtacttagtttttagttcattactcttagttatcagtctttttcaagttgtcgtgctttttcttcaagaacaatcttgttcagaccctaaacctaaaacttacgggggaaaaaaagcatggctgctaaaattgaaggtgggcttagagactggaaccttgcttgcttgctgtttttacccccaacttttttcttctccccaccatatccacccttcatccagtcatggccccacaaagattctgcagtcgaactttgttttatagatgaagaaatgttaggctcagtgctgttagactcactctgaatcacattgttaggcagtcgtagaattgggatttgagtccgtatctagtctactgttatcattatgttgtagaccatggataactgacttaaaataatgatgttctctgtgttatagttttcaaagggtttccacgtgtgtagtctcactcgattttcactctgtagactggcagagtagattactataacagtagttaatgtttattgaaggtgtaccctaaatgttaagggtaagggtacttttgcattcatgtattcactcttcatccgttttttaaactaattttttgaaacacagtaattggctgccctgttaaagttactggataaggagagattggcaggttattttaggttgtgaatcacagtttcagaaactgttatcacattcctcaaggtcatcaagttatgtggaattaaattgggagcctggtctgcaagagttcctctgaaaactagaaggcaatttttgtttacaagtctagcttgataattggatggtttgtcaatacagggcagtcacttcttagtgagtaggtttagtcaagaggacacattgtaattcaggaggttgcttggaacaggataaaaacagagggagtgtgttatttctgaaggatatttctgtcaagtagtggtatcctgattaaatgccctcctccgttctagggaaagtcctatttaaagaagcaaatcagtcatcttagtgtggagaacttttccctggatgttattacagaggcattggcggagtctctttttcgaagatccctgctgattagcagaaacagcccccatgcctggctaatttttctttctttcttttttttttttttgagatggagtttcgctcttgttgcccaggctggagtccaatggtgcaatctcggctcaccgcaacctccgcctcccgggttcaagcgattctcctgcctcagccttccgagtagctgggattacaggcatgcgccaccatgcccggctaattttttatttttagtagagacagggtttctccatgttggtcaggctggtctcaaactccccgcctcacgtgatctgtccacctcggcctcccaaagtgctgggattataggcgtgagccatcgtgcccagcaatcttttgtatttttaatagacatgggatttcaccatgttggccagactggtctccaactcctgacttcaggtgatccacccacctcggcctcccaaagtgctgggattacaggggtgagccaccacgcctggcccacgatcaccttaatctgttttcagagattgaaataatgaatacagtttctgcaaagtttggtctgtctacttccaatttcttgttactcatagggttctgatagcaattgcggcaatctttatccttggaagacccttggactctactttttctctcctagcactgtttgtcagaaactttgcccagtctcccagccactcttctaggattgccaaatgttctcagagggaaaaataatctggtttggggaagagaggtggggtggcagatctctgaagatttttgtcctctttggaatgttggctagtaatttttgattgtttgatttctggatcaataggagtttgttgttcatgagtcaagttattggaaatgacgaagctaaaattttcagtccttcattctttccttttccttttaaagttttaaacatttgtctggaatagttttgttactttggagttgggggaaagaacccttaatagctgtttttttttttaatttttgtttttgtattataactgtgtttcatgcttctagcctcattaaaccatcattaaggaattttcttattggccttgtgcagtaggtatacaacagacgttacacaactggatctcttaaatgattgggccaccaaatgtattaaaatacactttactcctttatttacctttatttaacagtttaatagctgcctttaattatcggggtatgtgtttttagtgtataatggccagaactcccaaactctttacttgttccagcaggtgtatggattcagtttacatgtagtccagtgctgtgtgttaatgtatctcccagatttcctttaagggctgaagtctgttgggactggacaaaatgagcctcttgaaaacaggagaaatatttaacagagcatgtggtacttctgggacttgataatgagcacattgggtattcatgctcctcctgccttcatcagacttaaaaaagaaatctctcctcagggttaatcagtttaccaccttttctcggagcaccttgcacatgcccctaaaacgtttgtattatcttgtctctctgttgggacttaaccttttgacaacacttctgcatgtcttttaggcatcttttaagggtgacagtaaaaattcaaattgttataaatgtcaacaaacaaaaaccaaatcctgcagtatactaagaataaaaatattcataagaaaatatctgctggccaggcatggtggctcatgcctgtaatcctagcactttgggaggcataggcgggcagatcacctgaggtcagaggttcaagaccagcctggccaacatggtgaaaccccatctctactaaaaatacaaaaatagccaggcatggtggcaggtgcctgtaatcccagctactcaggaggctgaggcaggagaatcacttgaacccgggaggcggaggtggttgtgagccgagatcgtgccactgcacttcagcctgggtgacagagcaagactttgtctcaaaaaaaagaggccgggcacggtggcttacgcctgtaatcccagcactttgggaggcagaggccggcggatcacgaggtcaggagatggagaccatcctggctcacatggtgaaacgccgtctctactaaaaatacaaaaaaaagaaaaataataatcgggcgtggtggcgggcacctgtagtcccagctactcgggagtctgaggcaggagaatggtgtgaacccgggaggcggagcttgcagtgagccgagattgcgccactgcactccagcctgggcaacagagcgagactccgtctcaaaaaaaataataaataaataaaaagaaagaaagaaattatctgctaatgtgtgtggggtaaagtgtcatggtttaaggtgttgttaagtaaaaaattctcatagatcatatcagagctgatttgacgtggataatatataaggcttcatatggtaaccatttgatacacatgtatatagttactagaagaaaattatcttaatagaagtcatattaattttgttaagaataaatgtagtcatagcccaaaatgtagctgtttgtgttaaaaggctttgactttacaaggggtttcatttagcctctttttatgaattatatattttgctagccactgagccagctgccacttaatgtgagccatcatttggtcatcctggtggttttatagtatagttagttaagtaagtgttgccttaaggagaatgacagatttactattatagtttattatcaatgataatcttttctgcatcatttttaattgacttcttctagggctttggcagaatatgtgaatcaggctatgactgaactcttaagtgtccagtatgtaatagcaaagacagagtttaaaagccacactataggacaactcatgaagggaaatgttttgttagattgtcttatataatggtaacaagtaaagtaagcatggccatgttagttggatttggtgttttatgtaagtgaatgttaggattggtgctcaggaatgcataaagatatttttctattgaattttaaatataagagttacaatttaaacrtgtgtaggagggtgttttatagacaaatttcacttgtaaagctggagaatggagaacttcagaaaaagtttacttaatattgtatactttcatcagttggacatttgaatttaatttctcattttcttgatattgaaataaaatatcatttagaaatacattatgttataaaattgacattttttttttcctccccaatacagaagctccaccatgaggcgaggtggatggaggaagcgagctgaaaatgatggctgggaaacatgggtgtgttttaaaagagtaaaaataattatatcgaactgtctagttatttttcattcttctgttataatgtggtttaagttgttttctaaattgtaaattactttagacaccacatctttgagttttcacagtgtattgaaagccttatgatgtttataaactttatcccctaaactttactctcaggaattttaccctgaggaaataaatatgcctagtgcacaataatttactatatgatgattttattgcagcattgctaataatacagaaaaacaggaaaacacataaatatccaataataagggattggtcaaataagttatctgtgtatagtggagcactgtacagtcattattcagctttatatatctcaacctggaaggataaccttgactaaaacaatgtgttacaaagaaatattttgtatgattatatgtttgtaaaacctctgtgctctgagttatggaaataagctttgaaaacaacaccccaaagttttaatgaataggattataccagttttaattttcttccccatatttcctgtattttctgaaaagaaacttcatagtgagcatataatattttaataatcagcaaaaataatgcagtcatttccattttgggaaaaaaacatcatgtacttctagccacctacacctttaatttaaagacctaataattgaaatcaagcttaattatatcaaagttcaggaaaagtatagttgaatccctagatctgtcaagatgtttagcaaaaaaaattattttttaatatttattgtgaggtgratgttatctaatgaaagttaatattactatcaaatagattgattagatccagaatttagccactggagcattcattgtattctttcccatgtgtagggaggactacactggtttatccagttgcctcatttttacctgaaataattcattttaagccctctgtatgtgggagatagtggaagccagtctaaaatatgctctgaggttgggcgtggtggctcacacctgtaatcccagcactttgggaggctcaggcaggtggatcacctgaggtcaggagttggaaaccatcctggccaacatggtgaaatcccgtctctattaaaaatacaaaaattagctgggcatagtggtgagcacctataatcccagctacttgggaactgaggcaggagaattgcttgaacctgggaggcggagtttgcagtgagctgagatcgtgccactgcactccagcctgggcgacaacagcaagaccctgtcaaaaaaataaaataaaatatgctctgagaccacttgtcaaatttgtaattggtttaaactttggtgtagcttgctcaattgtgtacataagaacaatattttgtgatattattactatgttttgatatgcagttttgctcttgttgtccaggctggggtgcaatagcacgatctcagctcgtttgcaacctccaccttctgggttcaagcgattctcctgcctcagcctcctgagtaactgggattacaggcatgcaccaccacacccagctgattttgtatttttagtagagacgaggtttcaccatgttggtcaggctgatctcgaactcctgacctcaggtgatctgcccacctcagcctcccaaaatgctgggatcacaggtgtgagccactgtgcccagccagtattattattattgacttagctttttttaaaagtaacttttataatcataagaatgtaataaaattaaaacttgagttgatagagggaaaattcttctttgacctatgtgttttatgtatttatatttatttattataatttttttttgagatggagtcttgctctgtcacccaggctggagtgcagtggcgccatctcacctcactgcaacctccacctcctgggttcaggcaattctcctgcctcagcctccygagtagctgggattacaggcacttggcactgcacccggctaatttttgtatttttagtagagacggggtttcaccatgttggccaagctggtctcaaactcctgatctcaggtgatccgcctgcctcagcttcccaaagtgctgggattacaggtgtgagccactgcgcccggcccaactttcctgttttatttattgccttgccttatggtttatgtttatgaggtcatcattatgttctggtcactagcacagaataaggtccatttatttatttagtttttaaaatttttttttttcaaaaaaggggggagaaaatgtaacctttgtgattggtttaccttttctttaattctagggtgggtatatggctgccaaggtccagaaattggaggaacagtttcgatcagatgctgctatgcagaaggatgggacttcatctacaatttttagtggagttgccatctatgttaatggatacacaggttgagtactttttayttaaccctattttggcaygtatttttattaggattgagaatgatttgttttaaaattctatttttactcatttattatagacaaatgattgtaagatgagaagaaataaatcatctgcttagatacttctttttcctttccatgttgcttttacctgccattgtctttaacttttatcaaartacatagtttcaaaaagtcacgtgaggtttaaaatgaaaaacgggaaattaccacacatgggtagtaggacttgtaaactgtgagcttcactgtaggtccatttcattggtaaatctctagatgtcattgtccataggtcctttagggtggggtggtgtgtgggtgtgtgtcagtgtcagatttcctagagaagaatcttttactctcttgtctgtagaagagtgtaaactgccagcatttgggtcgccaagcagggaaggaaaggacctgaattctcacagttyaggaagtaaaatttcacttagtctctctattcattttctcattcctacctcctccccaccagctgtgcctattgtcattgagtccggtatctggaaggggtagtgtagtctttattcttggtgaaaggaaagaaatgtgcaaatgcttstttgcctgttgcacagtttcaaggatgaatttatccacacatccacttttgaaggtgcctgtgtgtttatttcatgactttctctttgttttactggtaacaagcagcttctttccaagcttccatatggccagcttcagttttatctttcgctgaactgtaaagtcagttagcacttgcctgttagttaccaggttttctgcctaaatttttctctattttcttggggattcttcttcttatcatttcattgtattttttgaagtgaatggctgtaaatatttgtgtcagtctgttacatattcccctgtccccttctcagctggctgatacctgctatctttcaggtctccatgcctygctttcccttgatagtttgactgtcttcatactgatttaggtgacttcttgtgctcttctggagctatggctccctgaatgaatctgcatcttagaattcttcagacctttccatagttgtctgtttactggacaagagctggagctacattttcatcactatatccttagtgcctctacagtgactggacacaatcattcaggacatatttgttgaattggagttaagtattaattaactggtacatttatctggtttagtaagagaagagtgtgttgcttgtaattaagtgttttattaggcatcattgatgatgaatttagtccaagaatgtcatctcaaaataaatgctggtgcagcattgggaagttcacatgcagaaagcttgtaacttttctgtgtaggaaggtatcctgacaaattcaagctctgtggacttcctgagatgctctatgaaaaattaaaacgttaatgaaaacdggcattgcttcttacattagccagtcatggaagtctccagttcaagagagcacccttattcacataggaggaagaaaaagagattctttgtgtgagggaagaaaaatgaatattgcagtaatcactttttgattgagaatctggaattctaaatctgcttttatcactaatttttgtgtgactgtaaaacattttctgtttagatctgttattatctctatccttttctgcaggatagagatgataatatttttgctcttgttattaagatttcattataactgtacaaataaagttccattatgctgaatttcaccgagatatccaaactgtggtgctgtaaaataactttatttttagaaaaattaagttttagtgaatactttaccactttatagataaaacagcattaacaattagcaagtaaaaataactctttagatgtaataagacaagtaggaggtgctattttgtttttgatttaaaaaaataagctttatttcacagtcttgaggagtactggtcagctattttgtaaaatgcctatatatatattttggtatcatctttcttctccattagcatgtaagcaccaaaggtgcagactttgtcagttttgctcattgctattgtgaaagaaagttttcaggccaggcacggtggctcacgcctgcaatcccagcactttgggaggccgaggcgggcagatcacaaggtcaagagatcgagaccatcctggccaacatggtgaaaccctgtctctactaaaaatacaaaaattagctgggcgtggtgacgtgcgcctgtagtcccagctactcgggaggctgaggcaggagaatcacttgaacccgggaggcggaggttgaagtgagccgagattgcgccactgcactccagcctggcgatagagtgaaaaaaagaaaatagaaagttctctgaaaaggaatttggaggaaagagacttcattccagtgaacagtttgcaaacctgggagatgcagttttcactgtaaaagaagctgtggtgtcccttcttgttgattcttaaccatgctccccacaaactgtaataatccaagtgttcttgattcctttaaagctcccagttcagccatttgagcctctcatgatttcgtagtccctataccttccaacccagttaacattgaacttgaacttggagggaagaccctctaatagttcacctgtcaacctattcttcccttcacctggccccaaaaatgttttttgcttgttaagattgacttctttgccttctatcctttttgtttgttttgtttgtttctttgttttgagatagggtctccctctgtcacccaggctgtagtgcagtggcactatcacggctcactgcagcttcaacatcccaggttcaagccatcctctctcctcaggctcccaagtagctaggacctcaagtgtgtaccaccatgtccagctgattttttaattttttgtagagacaaggtcttgctgtgtttcccaggctgatctgaaactcctaggctcaagcgattcttctgcctcagcctcccaaagtgtggagattacatgtatgggccaccatggctggcctatccattttttaaattaatttttttttagataattgtagattcacatgcagttgtaagacatagcacatagtgatactgtgaaccctttacccagtttccccaaatggtaatatgtaataaacttgcaaacagtgtcacaactgggaaattgatactgatacagttaatatacagaacatttccacactacaaagatctttctttttttttttttgagacagagtctcactctgtcacccaggctggagtgcagtggcgcgatctcggctcactgcaagctctgcctcccgggttcacaccattctcctgcctcagcctcccgagtagctgggactacaggtggccaccaccacgcctggctaattttttgtatttttagtagagacggggtttcaccgtgttagccagtatggtcttgatctcctgacctcgtgatctgcccaccttggcctcccaaagtgctgggattacaggtgtgagccaccgcgcccggcctccacactacaaagatctttcatgttactctttcatagtcacacccacttctgttctccgcctttccttaactcctggcaaccactaatctggtctccatttttataattttgtcatttcaagaatgttatataaataaaacatacagcatataaccttttggggctggcttttttcactgagcataaattatctgtcaggtcatcaaaattgttgcctttttattgttcagttatatttcatagtgtggatgtaccagtttgttaacctttcatctgttagggacatcacagttatttcttggtaggctatgaacatttgtgtatgagtttttgtatgagtataagaagagtacagttgttggttcccgtaatagttacatctttagtttttgtaagaaactgccaaactgttacccaaagtggttgtagtattttatactcccactagccttgtatgagggatcaactttctttgcatccttgccagcattcagtggttttcattttatccattttaatagatggtgttgtatctctttgtgattttaatttgcatttgcctcgtggctaataatgttgaacattctttcatgtgtttatttcttatctttacatcatcattggtgaaacatttgttcatatttttttcctcattttctaattggatttagtattttttactgtttagttttgatatttcattatatattctagagactactgctttgtcataaaagtggtttgcaggtattttctcccagtctgtagtttttcatcctcttgaaatggtcttttgcagaacgtttttaattttgatgagatctgatatgttgatctttccttttatggattgtgcttgcaagtctaagaacttgtcactttggtgctagatcccaaatgttttcttctatatttttagattttatagttttatgttttacattgaagttaatgtttcattttgaggttttacaattttttttttttatttgtggatttccagttgttgcaacacagtcagttaggcatattttggtggatctgtttctgggttctctgttctcttccattgatgtttgtgtctgttccttcaccagtaccacactatatcaaatactgtacctatgtggtaagccttgatatcaggtagagtgattgctttcacttgtttcttctttgtcaagataattctggctattctaggacctacgcctctctctctcttttttttttttttcttgagacagggtctcactttgtcacccaggctggagtacagtggtatgatctcagcttaccgcaccctctgcctccctggctcaagcgattcttgtacctcagctacccgagtagctgggattacaggcacatgccatgatgcccagctcattttttgtgtgtttttagtagagatgrggtttcgccatgttggccaggctggtctcgaactcctgacctcaggtgatttgcctgcctcggcctcccagagtgctgggattacaggtgtgagccagtgcacctgacctatataaatgttaaaataagtcatttatccacaaaataccttgctgggattttgataggaattacattaaacctgtagatcagttcggggagaattgacatctttactatgttgagttttctagtttacagaccttatatcccattttatttttctttagttgattgaacagatatattttggatgctgcttgtgggttaggaactatgtttgaaaagagatagcagttgatggagaatgtggattttgtgatgaaaaagtaatctctaagccttagacatcaacagaggagggtgagtgccaacacagaagaggaaacaattgcctttgggagtgggagtgaatacttcataaaggaatcgaaatgtttagcttggtcttagataaataggcattttccaaatgaaaatggagaaagacattctagtcctaattctgacctacattttcaacctcatgttcttaaattttgctcaacaagattaccctgatattctagatttgtctttttacttttacagttctgtgtttctgtttgttcttttgcctctgaggaaaaactccttccctcctcacttctgtgaactggaagtatattcattcattaagatccagatatagttaggttttgcctccttccctgtctaagccagtccatagtagtagtattttatatagagagatatataattcatagcattattgctagaaacatttattttgacacctggattttgtcttgtgttgttaggtcttaattctatattaagttctttggcgttaggaagcctgttttatgtatagtaatcccttgccaaacatggattagagataacacctcagggccttaaatttgcagttccttctgcttcctcaggtcttcatcattcagatctctgctcaaatgttacctttttacggagaccttccctgacttcacctatctaaaacaggtgtactttgccctccagtcgctctctaaccccttatccaccttcctcttcatttatttgcacctaaaatggtattacttgcatgacttatttttgtctcctcagtggaatacaagtgctatcacggggcacagacttgagtcttgttcattgccatatctccagtgcctagaaccttgcctggcacattgtagatactcaataagtattagttgaatgaataaataaataacaggttttgtatttgtacatcagaatgttaaaatattttcactcagatgctaaatcaactcagtcttaaggaatgggccacatttgaggcctgcattgtaatctgggaggtaggctctgggcatgtttatttttgtgaaagctgcccagggggagtgagtgcttcagacttagtggacagtggttgcactttagtggtgtgagattgggacagttcatatggaaagaggtgttcaggttattttctacttcctttagtacatgggtaaaagaccaggtcttttgattttggcactgctgaagtttgtgaaaaagcaggtggaggggggcccggacaagtactttagcacaattcacaaaatgaaacaagggggaatatgcaagtgtaacagacttatatttcaaataaggatttgtttgaaagctgacagcttacattgatgttttctaaacatacaaatgtggtgttttaggagaggattctctttagtgttgacaagtctaattttttggaaataaatgcctcccagatattattttgtatggatatataatatctctccttccatttcctgtgagactctcatcttgtagataagagatggaggaattgaacctctgacatagaagacttaccatattaatttatgccacctcctgtaattttgctagtacctgatgtgaaatttgcacctagttggtactcaaaaatttgttccctaagcatttgaaacttttcttcagtttttgtttggttgagtgtatccgtggcttttagttgattgtggtgactctgttggtaagtctgaggtagttaggggtgagaagagtcaagagagtagtattgctgctgcagaaactgagggacaggagtccaaagacagaagggtatgcacagtaagttttctctgttgcctcatcaataagttatcttttctaattcataagattgtgaaactcaaatgaaataatgaagatgttgccatggtaggagcaaaggaggtataagcagccattcacctcacttctttctgtgatttatatagcacagtcaacaattaattaagttctttggatatgcaggaggaaatggtgcatatagtaaatgttttctcaatagagatctagctaggaaagcttttgtgcaagatttaaaaattttgtttatagaatttgttttaaccagatgagcaaaactttctataagctgggcctacagacgtgaaagtggtcttcatatggctgttttgatgttatatggtggcatttgctcttgtgacattttacttgtagggctttaggtctaaacgtgggctaaattgtggtccttgtatatggcttttacttttactgtgctttcaattgtctgtcactatgtctggttttagttaaacctcaaatttagttgcatatagaatgttctgcaaaataaaactaatagtaggagtattgtggaattttatttatttgtttatttaagataagctctgttgcccaggctagagtgcagtagactgatcatagctcactgcagccccaaactcctgagctcaacggatcttcctgcctcagcctcctgagtagctgggactagaggtgtgtgccaccacacgtaatttttggggtttttttttkttttttktttttttttttttttttttttgagctggagtttcactcttgttgcccaggctggagtgcaatggcgggatcttggctcactgcaacctctgccacctgggttccagtggttctcctgcctcagcctcccaagtagctggagttacaggcrcatgccaccacatccagataattttgtatttttagtagtgacggggtttctccatgttggtcagacttggtcttgaactcctgacctcagaggatccacccgctgtggcctaccaaagtgctgggattacaggtgtgacccaccgtgcccagccttttctgtttgtttttgtttttgtttttttgtggattttttttaaaagacggatcttgctgtgttgcctaggttggtctcaaactcatggcctcaaatgatcctcctgcctcagcctcccaaatctttcaaattacaagcatgaaccaggaggttgaggttacagtgagctatgatagagccattgcagtctagcctgggtgacagagccagaccctgtctctaaataaaaaataaaaaggcaaagaacaatgaggagaaaagcactcactctgacatttcaaaacagtgacattgattgtaaaaatttggaggatagaatttccctgaatctagttttgttttattttgattttttttttttttttttttttttgagacagagccttactctgtcacccaggctggagtgcagtggcgtgatcttggctcactgtaacctccgcctcccaggttcaagggattctcctgcctcagcctcctgagtagctgggactacaggcgcgtgttaccatgcccagctgatttttgtatttttagtagggacggggtttcatcatgttggccaggctggtctcgaactcctgaccttgtgatccgcctgccttggcctcccacagtgttaggattataggtgtgagccgccatacctggcctgttttgattttttattttctgtttattctttgctagtacatcaaggacattcttgaaggagtatatactgaagggtgggcaacaagagaaggatttgtaggagggattatgaattgcaaaatttaatgttttgtgtgaatagagagcagctttagctctagagctccttcttgcttcccggtttggggtaagaaatggtaaaaataatactgataatattgttaagagctgacacataattcttttttttttttttgagacagtcttgctctgttgccaggctggagtgcagtggcacaatctcagctcattgcaacctctacctcctgggttcaagcgattctgctgcctcagcctcctgagtagctgggactacaggcacgtgccaccatgcccagctaatttttgtatttttagtagagacggggtttcaccatgttggccaggatggtctcgatctcttgatctcgtgatccctccccctyggcctcccagagtgctgggattacaggtgtgagccactgcacctggccacataatttttactatatgcaagttacttttctcagtaatttataatttttagctcttaattcccacagaagtcctttgagacactattattatccccagtttacatgtgaggaaactgaggttctgagaagttaaataacttgcctgaaatccamgtaactagcaaatgatggagccaggatttgaccttagtcattcctgctttggagtctgtcctcttaatacattatatggcgtctctaatttgtgagtgagtgaataagtgttttgagattttaagtatttataccacttgtactccacttttgctggagggtggattctaggcaggagtctgggatgcattgaggatgttaatgaatttagcaaatactcactgagcacctgctttatgtcagggatatgaaagtgcttgacagacaaggttcctgccttcaaagagcatatgttccaggggggaatctgacagtaaacaagtaaacaaacagacatggtaatttcagattatcagtgctatggagaaagttaactgttacagtacattgcagagatgggttctgtaggcagtgtgtcacacaatgtttaatgtcatatagctttcatgatgttggatattatctccccctttttttttcttttcctttttttttttttttagacaggctctggctctgtcaaccaggctggagtgcagtggtgcaacctcagcttactacaaactctgcctctctggctcaaggtatccacttcagactccctagtagctgggactgcaggcacacaccaccacacctggttaatttttttccatattttgtagagacagggtctcactttgttgtccaggctggtcttgaattcctgagctcaagcaatctgcccaccttggcttcccaaagtgctggaattacaggtgtgagccactgtgcttggctcccaattttttttctaattaaccccacatctgctgaattaaaggagagtgttaaatacaaaaatgaatttattatgcaaatctgcagttatcgtgtatgttcttttggacttgtaataagggagtatgttctagtattgaagaaatagaaccagagaggaatactgctgtaaaaattaaaaaaaaaaaattcaaaatagggtagcttccagcgaccatgcatgccaacagttagcatgccagcctgttggacctgacaaagtggtccctggctgctgtccatagtgcactattggcaggtctgtttttgttgaaactttgggtcaccatgtgtcagcctatgtatattgtcttctgtcattttttttttcgtagagtctagggcaggatcctgaggtcatatacattactcgaaaggagttctagtgtgatcatagtttataataatagcagttttcatattgagtgacctctacatgccagactaatttcattgtaacagctttgtttatggagaaagaggagaaagcctaaagragttaaacaacttctccaaagtcacacaactcaggagtgtgaaagctaagattaaactcagatcggtcttattccatagtttatgtgatcttgccttttaactagattggttttcatgcttcacttcacactgaagaatatgtaagagctttcagaagtgaacttcaaagagccctcttaacttcatccagtagaagggcaatgtattttccagttccaaatttctggagtaattagttttcaaagagcagctagtagacgggtgagtactttatgagtatgtatatggaaagttaatgtgttcttgacgtgtctttttattcggtaaaggacagccgttttctatttaagtcattaaatagaattagtttaggaaagttacagattaacttgcaaattaattttttagatttctgtgatttcattggatttggtgcccatattaatgcattgtaatgtagcctttaatttgatacttctcactgttattctataagatcagccaggttctttagtgttagagaaagaaactgaactgtagattcctgactggctagctgtttaatttctactgtttcacattaaatcactctgatgctgtagttcagtttttaacttaaccttaaccctgaaaacttccattattaattttgaattcattttgtttaaaaggatgcttttaaatctctttgtatgacactgcccagtttggtagctgctagtaacatgtgttaagcacttgaaatatggctattctaaattgagatgcgttgtaaatgtaaaatacccactggattccagagatttaagaagaaaaaagaaagtaaatatctcagattttttctgttgattacatgttgaaataatattttggatatattgggttaaataaaattaatttcacctttttactgtttttaataaggttactagaaaatttttatttatgtggcttgcataatattttctactgaatagtgctaatatttgtaatcagtaatgtcaaattttgtgctgtaaaatttagacaaacctggtatgtctgtatgtgctgttagttttttatcttctagaaactaaagctcacctaattattgtcataatgaaaatgtttatttaaatacttggacctatattgcttgggattaagcttgcgataagccacatgtggaaactccccctgggtacagctgttgttaggggaggtgtgagttagagcattcattaggatgataggtgaaagaaagagaacagtgatgattaatgtgatgctagtaatgcaggccataatatgactttagtgaatcagacatttcttcttagggggaagcataagtcacattgtgtctttaagatattttcttaaaatatttccaatatttaagacatataagatattttctgtagttttattaagaataaatcatttgaaacaaaattgaaaaaaattggtgtttcttggtttgcagtcttttttgttttgctggactttattttttggccttaatgaaatttcatattagggaactggataatatttactatttgattaagttttaagatattttcttaaataaaaataaaaattataaagctttctagaagtaaaatctactaataagccctacagtaagtctcctttttagtaaatatgagtaactattatttatctgactcctcttgtatactctggaggagtggaaggattagtctttgtaaaatgattcataaatgggtttatagttgttaatttttaaaaacacaatatcaaggtcatatgctaagtatagtaaaaaatgtaaaaatatttgtactgttattagtatttgattcattacttgaggtccctatttgctctgctaggcacttcttagatgtttttgtgttagttggttgtctggcagccagggaagggggatgtactaaaagcaacatagctttctcactttgtgatttacctcccagctttgtttactggcaacacagccaaggagaaggtgaaccaatgacattcttaaagttgacctatttaaggagttattcattagggttctacttcttacacataagactcttaatatattttaatataaattttgcagatccttccgctgaggaattgagaaaactaatgatgttgcatggaggtcaataccatgtatattattccagatctaaaacaacacatattattgccacaaatcttcccaatgccaaaattaaagaattaaagggggaaaaagtaattcgaccagaatggattgtggaaaggtaagtttaatttattaaatttaattaataaatttttaaagttagaatactttttatttatttatttttttgagatagggtctcgctttgtcgcccaggctagagtgcagtggcatgatcatggctcactgcagcctcaacctcccaggctcaagcagccctcccatctcagcttccagagtagctgggactacaggcaggcgccaccacacctggctgattttttgtagagatgggtttcaccatgttgccgagactggtctcaaactcaaacagtcctccagccttggcctcccaaagtgctgggactacaaccactgcgcatggcctttctatttcttttataaaattgtaactaatatattgcctcctgattgacagggtgaaaaataatgtcttaaacaacactaccgtttaagctcatgttgwtaatactatagcctaggatttggcatcctaataaaagtagcatgttaatgtgtttgccaggaattaggggtgatgactcaggaaagtgtcaggaagcagttatgggagaaggtggagcaagcgtgttattcaacaaatatgtgtgcacctcttaaagactaggcagtgttctgtgttcttgggaaataacaatgaacaaagcaaagatcccttcactacctcatggagtttatattctgttgggagagaaagaatgagtaatgtatgagtacattataccatgttgtctatcacataggtttttagcatggtaatacatcaagataatgtggacctagaatgctaggagtagggggaaaggagggagtacagtcgcagtattatttactgttttttaatgattatattgtggtttctctgctgttggtttggaaatgataagttgtaaatcagtggtgacattcatattgacttcctaagtttaaatatgtcatctgaaaccttggagatgagctaaaacttaagtggtttatatttttaaatgacatgaggtatgtaatacatatgagcaattactgatttataaaagaagtaaaatattaaagtagtaattttatgtatggatagattataatcagtgtatgagagattgcttatctttttaagtcagttgctgaattttttttctagttcttgcttttactaattataacaccctccattaactgttccacaaattaagtattaactcagttcctttgtatagtgtatttagccgcataaattcacggagaagcagcgtggtggaaaaggctgggcctgggctctggagacatacttggcttcagaacttccaaactcggcagttcagtatccatataacctggtataattttagaaactttatgcttggccgggcatggtggctcatgcctgtaatcccagcactttgggaggccgaggtgggcagagaccagcttggccaacatggtgaaaccctgtctgtactaaaaatacaattagctgggagtggtggcttgtgcctgtaatcccggttacttgggaggctgaggcaggagaatcgcgtgaacccaggagatgggaggctccagtgagctgagatggcgccactgcaccagcctgggcaacagagaaagactccgtctcaggaaaaagaaaaaaaaaaaaaactttatgcagtcactcaggaccttgtttcctcatttgtgaaagaaggctaatatctgcctgctgtggttatgtgagaaataaaaatcatttgtccatacaacctggygcagtgcctagcatgttgtagaggtgtaatatataagaagctactgttactattttatttttattctgtaacattagcaattattagaaaattccaaaaattcaaaagtacattactatctctagaaagtcaaatatattggctgggcrcggtggctcacgcctgtaatcccagcactttgggaggccaaggcaggcagatcacgaggtcaagagatcgagaacatcstggccaacttggtgaaaccctgtctctgctaaaaatacaaaattagctgggcgtggtggcgcgcgcctgtagtcccagctacccgggaggctgaggcaggagaatcgcttgaacctgggaggcagaggttgcagtrgacaaaggttacaatgagctgagatcrcgccactgcactccagcctggcgacaaagtgagactctgtctaaaaaaaaaaaaaagtcaaataaataacattttacatattaaggattttttaaacctggagggataaagtcaaaggctcgtccctataacatcccactgattccttcctttgcactgtggtctcatgacctaaccactgtctatcaatgatatagtattgattaaaatggcttttaggtatgtgtctcttcaaaggacttggtcttagtatatgaagttggatcactcagagttgagctgtgttgtcactagagctagagtttttatctgggggcaatagttaggctttggagggaatggggaatttctgtggacaggaggagagttgaggggaaagcgatcttgctggggggaattgatttacttagaaaaatggtgttttccggccgggtgcgatagctcatgcatgtaatccccccactttgggaggccaaggtgggtggatcacgaggtcaggagttcaagaccagcctggccaatatggtgaaagcctgtctctactaaaaatacaaaaattagccaggcatggtgttgggtgcctgtaatcccagctactcaggaggctgaggcaggagaattgcttgaacctgggaggtggaggttgcagtgagccgagatcacgccagtacactccagcctgggtggtagagcgagactgtctcaaaaaaaagaaaaagaaaagaaaatgctattttccattacagttgcttgttttgcacgtgttctttttgccagatgcgcctagggagatcataagatagaaaaagcaacttagatagttaaaattcactttaatggattttatcttagtctggactgaggtttaatcatttgtctttaaataattaagagtgattttggacagcatgattatatatcctatgggcctcattttgtatttgaggagacagggccagtggggctcactgacttgcccaagaacagagtaggttttagagtccaggtgttctgaatcctgtttgtgtcctctttttaccatttaattaagcttgttatagatggcccatgtggaaatggatcagtgttggcatatatcttaaatgccaggagtccattatgtcattgtaacagggaatccttttggttaaatcatggcactgtttttattcacactctaatccctggttgatctcttcttagctgtgttttaatgagattttattatacttaaaaattttaacatgtattagctatttaataaacgttacatactcttctgaataattagtttttgtttttattcgagcagtttgaaaaggaactgccacttgtaagtatgtggggtgttgctttaatttcagttccctgatgtctgtatgtcagtagatctgagttaatgtaggcatggttatagggccctgactttgaaraggcaagggaatcctttcatgaggagcctgtgtacattaaagtgtgaaattattttactaaaacctttgttttgtaaatctcacrcttgtacatagtgtattaaaagtaatggtttaaaaaatttttgtcacagtctttgtcttgagacaattttaccttgaaatttgaaatgtggaatagatgagaagctgctatgacgtaccccactggcccaccaaacctgaggagtgtcatggagcataatttaaaaatattgtcctaagttgctacagattgttcttgtttttgttgttcttgattttgtgttgatccttgtagattgagaaccttgtagcgtgggttttttatatttgtatatcccgtgattagatggtcacatagatctgttgggagttgagacagaatgataatttattgttctggttcatgccagctcaatgggatctactagtaggactttcagtttatcttttytttctaaactcccaaaccatatacktttgtcatgtgcttacatatgagtcaaaactttggtttctaattacattcagtgtttaaatattagagtgcttatgcaactcatttaaataaaagttgattgcaattttatctctcatgagttttttttgccattccttgtgttttttttttttgttcctaaacgcagaggctgtaggacaaagcaagagtaagacttcccaaaatagatgaatatttcacttgctatgactatgttttgattcgttgtatagaatgtaaactctttcatgtatatatcagaatatagtttcaatgtacatgaaaaaactcagtgtataaggaaaccgtgtagtattatcttttggataaagatggatttttttattatcctctccttttggttttgaaagaatagtagaaaatgtcagtacagttcctttgcgcttagaacaagaggggaaatagtaaatgtgagaaattaatcccagagagatttttaaaaaggtcttatacaaatatgctttcagataatgtttctgtctatatatctatagatagataaatgggcaagcaggggtagttaggagtatacaactgatagatagtggtttaggcttcaaattataactgacattacttcactaacattactgtagtgcattgggctttaattctttttattgagtatctctgaggatatctgatttgagacttgcagtatttaaattggctgtctaattttgtagcagtctccatggactgacttakgtaagcctaagaattctgtgggtggccacatggctcttgttaggagctggataaggcctgacacccttgtatatgatcagtgctgaccatagagagtacctgtagagtctgcatcactccagcatgctgtcagtagggcaggaaaagcgagaatgatcatagggcgttttgttccttgcacttttggttttacctgagatgtgcagctggcacagtgggtgtagtttcactctctacttgtctcttagttatagctatctatgataaaggatggaaagctaaggttaggattttatttcaggtattaagtagctgtacttcttttggtgggggaagcaagtgagtttgatatacataataccacagaacaaagatttatagttaggcaattgagaccaactattaaaggaagaaaagggctgggcgcggtggctcacrcctgtaatcccagcactttgggaggcagaggcgggtggatcacgaggtcaggagatcgagaccatcctggctaacacggtgaaaccccgtctctactaaaaaaatacaaaaaattagccgggcgtggtggcaggcgcctgtagtcccagctactcgggaagctgaggcaggagaatggcgtgaagccgagatcgcgccactgcactccagcctgggcgacagagcgagactccgtctcaaaaaaaaaaaaggaagaaaagttggtttgaggaagaataaagtaaaaaatagtcgaattttagggtttcgattctaatatttgaatgtaacctgaaattttgaatgtattttgaatgtaacctgaattttggtaaaacatttagcctggtcataaatccatttggttacatgtcttgcgactagtatagtatgttctttaccatcataatttaatagttatagcatttgatataggttaaggtactttaggtagaattgttaaatatatattgacataattatataaaggacatactctgtatcatatatagttccgtttttagaatctgttagtatgttttcctgtattccaagttgttgactcagttatttttaattagtattctgtaagccaattcagtcatttcttaaatgattattttttaaaaagttttgtgtgacaccatttaagaaaatgaaaatgtcaagtcttggatttatgagacaataagaaacatatttttatcatgttatttatcagtctttttctaaataactgagggatgattccttggtatatattttaggtttaaaatccagaggttgttttgaaatattttctaatattaaagkagcttgttttgaaatttggatgatagcataagtatattgattggttatttttaaatttgaagtgaaatgataattttaaaggtagagtagccatatataactcagtttattagcaagaaaatgtcagttttagatactgcaatcaaattagttttagttctgaagtacaaaaggaagcagacatttgggaacttcagttacagtgctagtaccacctagcgttagaacactggtgttcccctggatttgagtggtgttgtgtgatatgctgtgaggatgtacatggtagttttggcccttgtagagttcatatcttcaaatggccttggctcttaaccattcttgtatacataaaaatagtataaattattactcttgaagttgagattctttattttgtcctatatttttattttacagtttctgacatgaatttggaaattgagcatccttattcagtttatttatcttggaaaaccttaatagatgagattttgatgaagtcttgatgattctctgttaactgttgacagggtggtaaatactaaagtcatgaggtttaaaatattgactagttcagctctgtgcttgcagtttttccccactctaagatcatattgtattaggaccactaaaaccgagcaagaaggaataaactaggaaaacagatgacctgttgttggtgaaatactgtatctttaaggacattgaatatttttcatgaagctcattgtcaccaagtatggaactctaaattggtgttgctttttgtttcagcatcaaagctggacgactcctctcctacattccatatcagctgtacaccaagcagtccagtrtgcagaaaggtctcagctttaatcctgtatgcagacctgaggatcctctgccaggtccaagcaatatagccaaacagctcaacaacagggtgtaagtttgtctrgttggggattactgcaaagctggttggttttttttttttttttttttttttgagatggagttttgctcttgttgccgaggctggagtgcaatggtatgatctcggctcattgcaacctctgcctcccaggttcaagtgattctcctgcctcagcctcccgagtagctaggcttacaggcgtstgccaccacgcctggctaatttttgtatttttagtagagacggggtttcaccatcttggccaggctggtctcgaactcctggccttgtgatctaccttccttggcctcccaaagtgctggggttacaggcatgagccaccacgcctggccacaaagctggtttttagcagtgagcatggcccctgctctgttacagtcagacagaagcagatacaaaccctggccattcacttataataaacatgttgaaatatgtgtgtatgagtgtcttatctaaaaatgaattatttttataatgataatttcataaatgtaagtaagtttttacagtcatactggtttctcaccttaaactagtggatcttaattgttaataagttttttcatggattttyatgaaagtaattatttcctcacaagtaatttgctgtattgctttctcaaaaatggaactaactgcaccagctatatttttgttgtgttccatgcatagaaagacaatgaaaatgttaatatttctgggttatttttgaaaaattcaaaattcataacattctaaatatgtaaatatataaatggaagtttagttggtgacccttggttatagaattgaaagtgaatctagactattccatgtggctgctttttttttttaatttaagcttttaattgcaaccctggataaattgtttcacaattaattggtgggttgccttaccttgtatatcaggtggttcattatggttagccttctctttatttattaaattgcttgctttgggagttggatatattttttttcgaaaacaccaggagtctaattaatctgagaggatccagtatcactgccttctgtaatttttgttgtcatttgttaatttaacttgtactcacaagcatattcaaatatttttcatgttacctgtagcttttaattttttttaatgtgctatcaaggtatatagcaaataataccagaaaaccttttcacagaatacgtagctttagctttcttttcttacccacattaataaaagtagaaaatagatatgttttttcaaaatcttctttgtgacactttaggaagaaattacyttttagattttacttcttaatacatttatgccattgcctaaaaaatgtatctctacccgtgatatttccagtacagctactttgcaaatgtccatttgtctaggctgagaaactatagtacagcaagaatgtatgttaacaatgtattttcctgccaatatatggctttctgttgcatgtgttgctataatgcatgtaaagggtctgaatgtttttgacacaaaactagatgtaagactttctgacgtacatcacttttgttgttttctggggtttttttkgggggtatattcagtacattttgtacatttctttgaaatgctcatctgtgacttcttgctcccttgcattctgtttatctcaagaggctgaactttctctgcatgtgacaaattaggttttctttttttcttcttttaatcatatctactttgtctttttccccatcactggcatgatcatctgtgarcatggcatctactcacagttgcctgtcacattccatatgatgtttagccagagcctgagctaacccagaaatgggtgatcatccagcttgtgggacttttctgtgtagtcaggctctcattactaataaaccaagttggtattagggtgaggggctttaggtggaacctgataatactgtggtaatttcacctgtggcttactactctgtagggcagcccttcatctggagcctgcgctgtaattgaattaatgctatggacatttggacattcctaagtagartgaattactgctttgtaattcaggtttttgtttttgttacttagatgattctcgtgaatgcatttctaaacaaacgtctagaggagccaggatgtgactttagcataacatttgtcatrggttctgcatttataaagctgtcatcaggaaacttggtccagattgccttgtaccaccctggcatctaaatatgcatttcttagaaatgaagtgcaatttcccttctcagtaaggcaagcgtccttatttttctaggtgtaaattttactgaattacccccacacattgacatggctttactttttgtctatttgtgcaacagttagctcattaataggttaatcaatatagtcagtttttttcctactgaaaccatctggtttcgtattagatttaatgtgttgaatagtacctttcataaaaactaaaactaggaataagaattcaagtaaggtttttaaatccatttttatgaaagttatttgtagtatattaattcagcagatatttattgaccatgtagtaaatgccaagcactgtgcttcagaactgggtatttacagcttatagattccaattaattttttatgggaaaaataactgaaaagttttttgggtttttcttcagccatgagaaatgttctattttatttcttctttgggactatctgaagtgaaaataaaaaacaaacaaaaaacacctaaagggctgttaatattctagaatttttctagttatcttgctacttttgcaaagaatgatcttttgtcaaatcagaatataaagtttgtggtttaagtttcagggtttttttttttcattgtcaatattcaatataaraattttctgtttttaaagggggaaataccaaactgtgtaccactaagaaaatgatgaaatgaaaaaattgttttaacctaaaagtcagatattattaactcaaaaattttttcctgctttagaaatcacatcgttaagaagattgaaacggaaaatgaagtcaaagtcaatggcatgaacagttggaatgaagaagatgaaaataatgattttagttttgtggatctggagcagacctctccgggaaggaaacagaatggaattccgcatcccagagggagcactgccatttttaatggacacactcctagctctaatggtgccttaaagacacaggattgcttggtgcccatggtcaacagtgttgccagcaggctttctccagcctyttcccaggaggaggataaggctgagaagagcagcactgatttcagagactgcactctgcagcagttgcagcaaagcaccagaaacacagatgctttgcggaatccacacagaactaattctttctcattatcacctttgcacagtaacactaaaatcaatggtgctcaccactccactgttcaggggccttcaagcacaaaaagcacttcttcagtatctacgtttagcaaggcagcaccttcrgtgccatccaaaccttcagactgcaattttatttcaaacttctattctcattcaagactgcatcacatatcaatgtggaagtgtgaattgactgagtttgtcartaccctacaaagacaaagtaatggtatctttccaggaagggaaaagttaaaaaaaatgaaaacaggcaggtctgcacttgttgtaactgacacaggtagatacttattaaaattgtcttcttaakaaacagtcatgcttgatcattttgctcttatgctattattggtatttctggtcaatatgaagttctcataaaagtctctaagtatgtcaaatcatgtaagttacagtaagcataacatagaaagctaatttattaaaatatttttaaaacaattagatataattgtggctgactgaaaattttcagagaatttaaacagtaagatggttgggattctgagcattcattcctcacgtagaccttatcagttggtgaagttttgaactgtgttaatataacatctatccagtgcttaaactcctgtaagaatgaaattggtttgataagagtaattgttaatttctagaagcttgcatcataatgattttttaattttgacatagagctgttgtaattaacagtggtaaactttcagtgagattatttcacatcttaagtacattggttcattgtattttgttttttaatacttttcttgtcatcaaaaacaaatgcacacacagtagcatactgtttttctgggccagtcattataaattagtatctggtttgaaattttagttccttttacagattataggatttttttatggggagagacctcagagattaatactctataatttatagctgtggaaactgaggtatagagagaagctcatggttctgtcctagaaagtgatagagactctatgtggggtgttttctgttatgttttactgagtttgatgtattcctatgtgcttttagtcaaaaaatgctttttggtatttatgaaatatttcagaataatatagatactagattatccttacatcatgtcttggccttgttacctgaaggttatttaattcttaatgcttctaagaactatgattaattagttctgtgaatgggaataaaatgagaaattttgttattgtatgaaagcatttggtagatactggcttatgcattctgtactacttgaatgtttaaaagcgttattttgagttgtttgcattatgtttatatgatattttgaaaaatacttttatacagcagaattgtgattaagattattttatgaatcatttcttgagataatatagagggtagtaaggaagtatctggctttggagttagatagtttagcatgaatctaaatccttactctgccactcttaggctgcaggactatgggcaagttagttcacctctccgagtcttagttttctttgtgaatagaagtgatagatagtccatgatgtttgcctcatggggttgtgagcttaagaatacatgagcaggctgggcacagtggctcatgcctgtaattcgcacactttcggaggccgaggcgggaggattgcttgagcccaggagtgcaagaccaacctgggcaacacagtgagaccgtgtctctaccaaaaagaaaaaaaaaattagctgggcgtggtggcacgcacctgcggtctcagctacttgggaggctgaggcgggaggattgtttgagccctaggggttgaggttgcagatcgcaccactgcactccagactgggcagcagagtgagaccctatctcaaaaaaaaaaaaaaaacaaaaaaaaagttgggggagaattaggtacatgctatcacagtcacagtttggtaaatggagtggtccaaaactgttaggggatatctgtttttggaagcctattataaagactgaccctcagtactaatatttttaagcctgagaaaaactcctttatgagatcagaactttttacaagcccagggttctttttccaggatttgtgtatcttagaggaccagacgaacaggctaaggatgagactgataatagaggaaagctctgcttgtgcctggattagggttaaaatgaccctgatgaatctctttgtagctcaggatgattagaagcttttgtccttaggtgaggacactcacctttatctccttaaatgtggtatatgtcattcagctctgatctttaatagtatttaatggcataaggataaaaatgtacagatttacattttatagactgtttttaagtacttagaacagcaacatggtagtttaaaggctctgaaatcagactgcttgagacagaatcacagctcaaccatttaataataggctatgtgacttaaacttttagtctacaagatggagatgatacgattacctacctcatagttgtgagaatttaaataaatacatacacataaacctcttaacagcagtgcctgacacctaccaagcactggataatagtagtcacttttattgttgttattttatccaggcgcgtttgtagattgcatggaatagtgatcatcaaaaaaagttttacttagcttcatgtaactaaatgtatgccaacacctttgtatttttataaaataatcagcacagtgaaataattttaagatgcactttttgactaattagagacttaattaaatttggcttctcttgaggtgatagaaataatctgtactcaattctggttttttaaaaagactccattctgggtgtaagcatgttttaaatataatttctaaaattaactagacctgatgttttaaatagtaaaaattagcttggggtttgaatgctgtctttttccttcyaggagatatgtcagtattgaattctcccagacatcagagctgtataatgcatgttgatatggattgcttctttgtatcagtgggtatacgaaatagaccagatctcaaaggtctgtattcttgcttatgttttaagaaaactgatatattgttataaatatatattcaaagagattacaaaatctttttttaaaaaattatgattttccttgggaaaatcggttcttccaaattttctatattcgattatcagggaaggtatagggaaattagagtttttctttctccctatagggatcttcagggaagaatattcatcttcagctgaaggatatgtcatcgaagactaatgtaggcaggatctgtattgggcattttctaaatttttatctgtatttattccttgttaatgaatggaaattttatggtggctcttgtctttgagacttgggtcactatgctttctcttgagcaaataacttgattaactgtcctgatgcccatgaacatcccaactttttgattgtaggatagttttgcattattgaatattgctaaaatgtgttaagtcgtctggacagtctttgtcttagtgaaattgcagatatttgtgaactagtcagtattttaaaaagcatacattctgggtttttcagtgtttacctctgtctgaaagagataacttagtgttttcttctgagaatcaattcttcccttaaataaggaatcactatggcacagaagctgctgtgttaaaaccaggactttatttttgtcatgggtagtagttcctcagctctgaaaggagtttttagaatgttaaataattgattttcatagagtagctttttaatgcattgttgattttatttcttggtcctcaraataatgcattaagtaaatatatatttatccctgctattgctttacaratttatagtaatcttgtaacttaacatgcatacaaaaggaaatgatacaggaaagtaagtttatactaaagcaaaaattgaggggctgtatgctcatgtttgataatgtggtaggtcagattgtgattcctatgcatatgtatttagtttctgttgcgtaaaattgagagataagtatagatgttaactctagaaatacaaaaaaaaatttagtttttctttccccactacttaagtctgaatctagactcttgagttgcctctttcctacagtacgaaatcaaacaaaaaccatggaaggctgagttgactgctgctttcaggttgaataaatgtatcaaaatggtcacaaataattggcttttctggaggtgctaagaaacttaaatgacatttacatggtgattgataatctttaaagtattagcttctttaaggattaatgtctaagtaaagctaaagaaaaaaaaggcatgtttttaaaatcctttgaaaaatttttgcttacatgttgttaacattcctgtaccacatacagaaataatttaatattttcctcacaggaaaaccagtggctgttacaagtaacagaggcacaggaagggcacctttacgtcctggcgctaacccccagctggagtggcagtattaccagaataaaatcctgaaaggcaaagcaggtacaaatgagctctctttgaagtcttagtgctcctgtggatggcttctggattttgctatttggcatggttgttaatagaaatgagtgcagagttgtagcaattagctttttcattcaggggttttaaggatgtcactgttaggttttgttgaattggagggtgatattttcctgaagtagagagtgaagaatgttttacaagatatgattgatttgctttgtataaatttagattggggataaaaatcatgggcagaatttaaagaagcctctttctattgtgagagttaattactggttattgtatcacagtaagaatgttaaagtttgtcttgctcaagatttgtatgaggaagtagaataacaaacagtagaacttttaatttattggaattaaaagtaaacaccagtaatcattctccatatgctttagtgaacctgttatgagaaataaccttgttgcctctcttgactttttaattttggatattaataagcaaaatcataagttgtactagtcataatacttattaagattttcatgtgtctattgcttttttcccctgagtaaattcactgagaaatgttttcttagaaattaaattttttttggtaactgattagttttctcatggttgttttgcaaagccaaagagaatttttaaaattagtttctcagaaatatattacccagaaagtagtcagaagttagatatacagtgaaatggaaagcatgcagtttagttttattgcagttatttcagtgcccttgtcagttataaaacgttgggcttgtcacaatgactccaatgaaattaaggcaaaaggaaagccagcgaacatctctgaggaccttttttgggattatagtctttttgttggttttgatcatctgtttatgtggtcttaagtatgaaataacataattgcagatacatatttatgctttgtgtgtacatttatttccaagttttataaaggttttcttggtctttaaatcttttcagagatttttgagattctagaattttgtgtgtcatgagtagatgtggagtagctgttactgaacttgttgagatttacttgtattatggtataggtagtttcttaggtattggtagtatggtttttgtggtaggttggtttttctttttgtattttctgtgtgctattaaacagatgaaatcttaagttctagaaaataagaaatagcttaaggaagtacacaatacttgtcatatattaggcatttatgaaatactaaagaatgctgaaagaagaaaaaccaccatgtatatacttgcagtagcatcttcagtgctcagagtctctctggtaggtagtcttgttacacacgtccttttatcggcagcctacatttaaaattttaaccttgacaagctcacattccttaggagtagcagagagctagtcctcttttgtcttttcttctgttacaatcttactataaatggcttattaacacagtactgtcattggttacttgtcttcatcagtttagtcacctaatttttataacattttaatgaccttctataatcacatccccttcacatctaaatgtgggtggtaaaccagaaggtaatattaggagaaatatttaaatttcacttgccattgaaaattgtcaaaaggagattgtcccgtcactagaaaaagattatatgacagtttgtattttatactcttactttaacttgatgtcatttacttttatatcctaagccttttcacgtattaggagctcaccagaatatttgctacatataaaatgaatagattatcctttattataaagtttgattacaactaagcttgtgctcagaacttttttcagtgcttttgttcctctttgcttgttattccctgatctttctttctctgggtcattatcagacatggcaccaaatataaaaatattgaggatcggtttaggaattagaatctttggcttctgtgcactagctttgaaaaaaaaaagatcagttctaatgtttggcttatatgtctagacaaagtattaggacaaatagcatccttagtcctttttgaaactttagtttcttagttgtcgtatccaaaaactctttaattagccccgtgcaaccagggtatctcatccatccatgacttcttttggaggctgcttcctgagcagtactcagtagtcacacttctcattgatgatctcattgtttggaacaatttatgctccaaatttcatggttggggccttttaccccttcctggatttccaggatacagatgttttctatcccatcgacaacttcagttttcattctaaagaacaacagttttaaaaatcgtattagtcatagatttattctcagcgatttctttttcacagacttgggtcctggcctctgatttctccaaccgttcctccacattctccatgtgcccgtctagtttgtcaagttttgatgagcagttctctactttgccctccagtgaggacagtgtgtccctgcatttccctgaatctcacatgaagcaactcactccgctcgtggagggacccacgcactctgctgcactgtggaacaggtcagccagcccaatggagaggaacacgatggtgctgcctctcaggccagggcactgggggcgcatggaccacagagactgttctctcctcaagcataagttttctgttattttcaagacaatatcttagataactagcccttcagataccaaagtcaggtaattctccaacttgtaaggcataactcatggttacaccttggaaagacagttggttgtggctgttcaagcttcagcactcctttttttggggtctagtagcaccctctgttgaagtgtgatactgacagtcctgaaattcttacagtttttcagcttagatgaatggactattaaaatttatatttacccttttaaaaccctccagaaacactgggtaatctgcttgggattctgtctttaatttgtaatagtatagctagcatacgttattcatatgtcagaaactagctcacattacacactctgctgttttgaagcaagtaggatttgacccgagatgttagtcagtttgatttgcatttatgctgtgtatatatggttgccgaaatccagaaatgcttgtatgggttgcatagttagatgaaagatgctgatgattattggtcaaaccaggaagagttgtttaagcccatgaagccagagactttgccagttttcctggtggtgcattaacgtggctgacttcacagaacagtgagtctgaaataaacaaaagagaaatgctgggtttcttagttatgtgttgttacagtgcactcaaaatagatttgtctggaatagctgaagtgatatattttgggtttgttttactcatggtacttttgtttataatagtagagatgtggctgaggttgtggttttagaatgtgatttttttttttacagcatactcttcctggaacctaatagtagtatcccaagagacctatgatgaagttgtgttttaatttatttctcaattactagtgaagctaaaggtggcaaaggaagtaaagtggcatgcagccagtaggctctccagagtgtgtggttttgttttcttgtgtaaagttgtaaatttggtttggatattaagagatgttggtaagccacactaggctccagttgtgttctctaaagcatcgatactctgatcacacttgaatgtttttaattgaacatgcattattaaaccaaaatacaattacctgtagcgggggataatgtgacatgtgtacaaaagaaaaagcttgaatttaggatgaaacctcttcatgktttgtgacctactaaattattgtttgatcagatagatggtaggaatttcatgtttgttgtacccgttagttagctttaagttttacagatagttcttttaggaaacagcaaagaatattcagagaaatttatatttttcgttaacttttccccactaccragagctgtacagtccttttaaggttataagagggagttcatctccctgatcacttctcatccatgtccacctccagggactgtgtgttataggatattttatatttatcttctggtgtatttaaaaaaaaaacaaacctcccaggacactttgaatttattataagtttttatctgctgatgaagaatataatggaagcgaaccattttagagttttcttttattagataaggagataataccaatagagataactgtatttggaatttactgaacatttttatatgaaagtaatggaaaacaaatttcttgaaaaagtgagggaaaatcagtttataacatataaccattaatttttttttatttttaaagcagatataccagattcatcattgtgggagaatccagattctgcgcaagcaaatggaattgattctgttttgtcaagggctgaaattgcatcttgtagttatgaggccaggtatgtagaagttgtgtgttacaattcttaatgaataatttggttaattatttttatataatttcttgaactataatcttttgaagtggatttaaatgttacagacgtgttatgaggttttagccttaatcatctcatctatgccccccacaaccccccaccagtgctagataactttaaacaaacagcttactagttccctgatgagaaccaataggtcatgtagtaggaaccaaaagaaattggggatcatcgtttttactrtcttttgaagagtgaaataaaagaattagatttttttttaatggaagaggactttaatatttattccctctaatcttttgtttttattgctaagaaaaaatcttgtaatccatacttcctgatactcagtttttttagtgttaaaacccatttgcctatgcaattataagtaaataattgaattattggcattcttaatatctcttcacttaaaagtgttaagagtgttgtcaacttgttagcaccaactttttgtataggtctttatcttatagtgatctgaaaccataattataattggctgtttcagtataggaagaaacacacacacactcatatatatatatcttcctcataatttaaaaaaccgttttgaaataattggaatagttgtaaaagtagagggagtaataattaaaaagagaagtcttcatttttttttccttgtcaaccaaacacagacatttttacctatatcacacagcaagcccttacacattgctggcaagtgttaaagtattcaataatttcaaatcgaaacagagtcttagatcagttacatctttttttttttttttttttttgagacggagtctcgctctgtcacccaggctggagtgcagtggcaccatcttggctcactgcaagctccacctcccaggttcatgccattctcctgcctcagcctcccgagtagctgggactacaggtgctcgccaccacacccggctaatttttttgtatttttttagtagaggcaggrtttcaccgtgttagccaggatggctaactgacctcgtgatccatccgcctcagcctcccaaagtgctgggattacaggcgtgagccactgygcctggcctagttacatctttttagtcttgattcagagttgtggctattcaggcatctaatctgaagaaaaaatatttgagctcagcatcgtctaatcataatagttttttttaaatttgctaattattttatttaaagtatatttaagttaaaaagcattaagttcaaacgtgcatgcttatattttaaactgttttccattcatgacatgccaaacttttcctccccagctaactttgcctttctcattaacagaattatgttttaatggttttcattgtcacttgatgctgtggccaaggaattgaaacttactttaaatgataattaagtcaaatacaaatacgttttgaattgttatactgctttttattaccacaggcactctagagctgagtttatgttgtgctcagtaggctagtctctttttctctactaagttaatgaatggtggcctggacttcagatggctagacagttatgtgcagtatctggagggtgtgatgaagcccagaaatattcccagtccttgaatttcgctagttggtaaaatgcgagctccgtttacccttgctaaggctgcctctgcagggtctctccctttataccttcatacccagtcccccaccaagatgaatgctggctggggagcagggctgcctccaggtgaaagtgtcaccagctctggtggctttggactccaggagccacaattgtgtgtaggcactaggcttctgttgggtgtttggatggtgcatttatatttacccacggtaaatataaatttacctttataaatttggtcaagcttcatgccttgcaaaataattggggtgactatatgaggacagaatactatatagtgagccattcaagtgccacttaagtgcagatgtttaagaagatacataaagtgatgaaaatgaatttaacttgaagaaaaaaaaaatgcagccgtaagatttttgtcccttaattgtgattttctgttttctagaaggctattcctagtgaaagtttctagaaaatagtttctggatacttgttttgtggccatccaacaggttatattttccttatctgaggaaaatttttttaacaatttgcataagagaaatgttactgagtttggagtggggactagattgtggggatgatctgctcagtttgatgcactggtgagttttcactatacatagcttaataatggggccagcaaaggatagaatgtgaatatgaaatggtagaaatacaaagtagaatgtgtatatgtgggtcacagtttgcactgctgttagtagttggcctatacttacagtagagagcaaactttatatggaatcagtgagaaggtagattgtacatgaataggtaacgatacacagatatcctagaatcacagatctttaaagtcatataatttctaaaccccattttyttgtgcttttgtaaggacccactacctttcttactttatggatgtattttagtatgtagaatggacagtgacagtggtttgatggcaatttttttcccccagagatgaagtcttgctcttttgcccaggctggagtgcagtggtgctatctcggctcactgcaacccctgcctcccaggttgaagccgttctcctgcctcagcctcccgagtagctgggattactgctcccgccaccacgcctggctaatttttgtatttttagtagagatggggtttcaccatgttggccaggctggtcttgaactcctgacctcgtgacccgctcgccttggcctcccaaaagtgctgggattacaggagtgagccaccgcacccggccagcaattttttaatattgttgaatccaacaccaaatacaactgtctgaacaaagcatattgccagacagaatatgtcctctgtgctttaaatgtaggaataagctgtttttgcagcatacacttaacgaagttttggtaatttatcctgtatgggattttagttgtaatagatgagtcacggtaatgaagagacactttgagacactttggacttttttgtaattgtctttactcatttattttctatggaacaaagctcatttcccagccatcaactcaaggtatttggcttcccttagtatggcaaacctaaggcaaaccaaaggaaaaaggttttcgttttttgtttgtaacttccttatagtgtctaatggctcttaaacagttttctctgggtacattttacatgagtacataagtagatgtactatattttactaagtaatgtgcttcggaaaatttttgtgtaaattaatgttttgaaaatgaaaatattgtaaatataagaacatgatatttatagggattataaacacattttttttttttttttgagatagaatttcgctcttgttgcccaggctgaggtgcaatggcacgatcttggctcgctgcaacctccacctcccaggttcaagcgattctcctgcctcagcctcccgagtagctgggattgcaggagtgtgccaccatgcccggctaatttttttgtatttttagtagagacagggtttcaccatgttggccaggctggtctcaactcctgacctcaggtgatccatccacctcggcctcccaaagtgctgggattacagatgtgtaccaccgcgcctggactataaacatatttgggtttctttttttgagatggagtttcgctcttgttgcccaggctggagtgtaatggcgcgatctcggctcactgcaacctccaccctccaggttcaagcgattatcctgcctcagcctcccaagtagctgggattacaggcatgcgccaccacttctcgctaatttttaatttttagtagagacagggtttctccatgctggtcagggtggtctcgaactccccctctcaggtgatctgcctgcctcggcctcccaaagtgctgggattacaggcatgagccactgtgcccggccttataaacacatttttaaaaaatgtgttatctttaatttgtaaactcagcttttacatgctgaatctatatatctggcataattattacctgaaatttacccttttcaacaccagaccttttttctgctttctgataaagtttctaaactattttatgtttctacatatatgtctaaactgttaggtatctactttcttcattagtggacaaagcctgttgaccataggtcatccttttctaggcaagtgcaaggttgtccccatggaggtcatggagtttgctttatttgccatcctatacccagcacctcgctaagtcctcgacacatcaagaattgttttctttacaactctgtcattttccttyctcttaggtatttcttatctactagggacttagcactgagaccatttataatattactatttttataaacataaaaatgcatgtgattttgcatctactgctgagtaacttggaggactctttcttcttggctctcatggtctggatgttgggagggtgccagaggcctatgagtaattggcaactgtttgtatatacgttkcttaaaacaaggcacgtctccatgctgtgtagtaaatatttattgaacatatatatagaataaccattatcctattatataatatgtaatttggtgaaacattgctttattattttgcttgtttttactataattttttttcttgattctttacagagtgataaaatagaattttactaattatgtataattccataattatagttttgtggtgaatgctccaaatgtcaaaggtaatgtggggcactgagacacacagatttaaaatttaccattttcaattaggtccctcaaagttctggaaccctggctcctgcccagagtgatgtcctaccatgtacaatgctgttggcatctcaaccactgtggagccacttcaggagcatggaattggtcaattgggaattgggtggtaataggatgagtacattttgtctgtttgtcacatagcactgttttgtgtagttcttttgtttatattctttgtctttgggggatgaaccctggccaaactgtgccttgtattaggggaagaaaacctctttttgacagcatattcctgctctgtggtggttgtgatatcaccagcatatggcatgctggcatctctgcaaaggggccagaggtatgagttttaggagaaagcttcagatacaagagccaaacctggtattttaatgacatagttggcacatctacatgtgtcatttacactattcagacagttgtgacttttgggggaaaacaaggctgtaaattttaatgcctatctttaatccctaatgagaatggagttaagtggaaattataaattagtggcatggggagatatcaacatatttgataaatatttgagttgaaaacttcctagaataacctccattgtgttttgttctcgctctaggcaacttggcattaagaacggaatgttttttgggcatgctaaacaactatgtcctaatcttcaagctgttccatacgattttcatgcatataaggaagtcgcacaaacattgtatgaaacattggcaaggtacagtgtatcaaactgtcattttgtgtctgtgttttccttcttttagctaatagtaaagacagttcaagttttctttaggattgtcaggatcacttttgttagaattttatcttccaggaaccactcctcagcatcccagtttgagacctttctttgggcaatttccaggtagctcaatctcaaaggatagttttgtattgccaaaattgttcatgtgcttccttggttgatgtaagatctgattatttgcttatattacttctagtctgtggttctggttttcttcccatggagccagatagatgaaggatggaattttttaacctggttwttctcttttatttcattttaattatagttttgttcaaaattagaactgatgggttgataacaagtggagacactttaaaacctttatcttcttaaaatcattggatatgccaaaagttagttttcataaaagtgggtctttaataatagtttcaaaatggttgatgagttggcttgagaaaaggtgattaattttaaaaatatttaaaattgtagatgtatttaaaaatatttaaaagtgtagatatattccatattaactcaggactcaaatttcttaaaagtataaccagcctattatgctgtaaaccaggggtcagcatagttttctgaagggagccagataaagtttctgtcactcaacagaagttctcagttctgcgttgtgaatggaaagcagccacggggaatgtatatgaatgggcttggtgtagttccagtaaaaatgcatttactggatgttaggccaaggtttgtcaactcctgggcagtattaatgttccaagagatagacttcttgcctctgttttcacctctgcctcttcctttttatgcgttaatttgaacaccagtatctgctaagtacaggtgactgctagatgctgctagtccagaagggaatatctaatccttgcccttgtgggagcttgctttagtaggagagagagagaaaatgtgaaggaactgattatttcctggcgtcattatgtaggagtgagtgctgaatgataagacacttattatagctattctattaacacaaagagaacacactaattaactttccagttataagttgggtaactaaataaataaatcccaaatacaggaatgttggtattgtcaagtggaacgtgctttaaatcctctttgaaaggaggaagtcagtggtagcatccaaacgagggctagatagggatgggtgactgaggtcagtactgtggtgctcctgtgtcctgggtattgaagccctagagcaagcatcagcctgtgcctgaggttatgaggatgtgagagagagctgtgacctatactcctacacagtcacatgcacacggtcccagtagaaggctggagacagtttcagtggcatgtttctattcttaggggaaaaatatccacagtagtgttcttctaccacccttgggaaatcctatctcagcttcatattctccctgtctcagggcagctttcactctgaagcaaaatacctcataccagatatacccttctgttcttaaaaatgtcatactttaagcctaaacaaaacatacttatttctttaatagattatttctttaatagagatcttaatctgattgtaacctacctacagtaaggtgtaggtgagagatgaggaccgccctcctagtctacattaccaagtggattatgaaagacatagttttgatcctgaggcctcttgggaaagtttcctcccatttctggtccagttctattttgtgatttcttagtcctcgtattagcatgggggccacatagcaactcttgtcttcctttttcttttctctaattaaaacaaatcctttttgtggatagatcctatgagatgattttttaaaaagtatgtccacatgcagagagtgtagataactattctcagacaagcagttgggatgactggccactttttccttctgtattctaggcctgctacagtgagtggaatttaactgtgatattttggttttaggagagtagcaattactgatttgtctaatttttctgttccttaaaggattctcataaaccattagattaaatgttttgacagttcaaattcacccaccggttttcaactcttcaaaggtttatagaagtattgtcagtatagagaaactgaaataataatttatgctgtgtttttgtttttttgtgtttaaattttttttgttggttattttactcctcaaacattttcctatccaatatgctgtattttggtagttaataaggagaaagagaacacactaattaactttgcagttaaaagttgggtgactaaaatggtacttcagccaattcatttaaaatgctttgtgaggaaatagaaaaaagagaggataagaagactattttgcaacattgggtctaccagatggtggctgtggctgtgattcgttgcctttgctctgtgttgatagctacactcataacattgaagctgtcagttgtgatgaagcgctggtagacattaccgaaatccttgcagagaccaaacttactcctgatgaatttgcaaatgctgttcgtatggaaatcaaagaccagacgaaatgtgctgcctctgttggaattggttagtatctagcttatcttgtactcaaaagagttgctttgagattcttgaatatcagttaattttatggagtttttctttttattagcttcctctcacttgtaaaaccgtttttagcattgcttacarttgtgtgacacacgagataagtgctggaaatataagtaaatggttgataatcttcgcaataaataagttagaatatttcttacttattcttaaaaaattgggaaggtttcattcaacatttgtaaacagttttttttttcccaaaagtgaacggaaaccgtatttaaagctaggtggtggtatgggtttagagttgcgtgttaagtctgagtcttgttactctctgcacttcagcctcccggcacatggagctattcctgtcttcactcagttctagaagtcaccctgactccaagtgctctcagtaactgtccagtctctcctccatctccatccatgctgtctttaaaccttgtactttgtttccacagctgctcccagcacttaccctgcttttttgttgattcttccagccgtgtcctctggaactctttcatacttaagcttccctgagtcacctcttcctttcttaacccactcattaccttctggcaagataccccttttcttgccattctgttactagagccagtttgtccctgccatactcagtataccacaggcttggaaggtaaagttaactgtcttagcttgccattgtcactttcaaccattattcctccatcttcatccaaaaacccttcttcttccaaagttccctgtctcctttgtacccatgaaatttactaatgactgagtgatgatgcagagaggctaatgccattgaaagaagaatttgttacttccatttcccgagaggaggggcacaccgtgctacacaggactactggggaagcaccagggtggttaggagacagaagctgaaggagtggcagacggagcgcctaggctccagagcctttgttagggtttttttcagaaaggcaaggcagggctgaggaaacactttaggagtggctagtttgagtaattctggtgggctctgggctataggggtggtccctagttgcctggtagctggccctgggacaatttagggcaggaggtggttaggttgcatatgacaagtgtgcttccaggtaagaggtttactgtctttaggaattagccagccctgggagggcagtctctccccagccagcaggatttttaagatttcaaaacactgcgagatacagaaaataaaaagtatgattaatacattcccagcattcctacagctactggctagcctaccttttaccccctgatgttggcccacagacattggtaacatttcacttaggaattctatattccattgtcaggcacaattttatttttttgtttttaattgtccttaattttcatttataagtgatcatgtgaatccattcttttaagttcaagcatatgtaatgccaaagtcccactttatatttccactcctcagtgcctttcccctcccctgaactcactacttttatcattttggtgtgacttcccagaactttccctgttcgtgaatctctgtttatataagtcttctataaaaccaagatatgtcctcaatataagtcttccctttggagattttattattcacggagaagcccacctagcagctgagctctgcagatccctgccccttctcagggcttggtgcccttttcctccactgcttctgtggcccctgcccacacctacaccgtgaacctcactgcctgtctctgygttttgaggactcttctaccctcagttcccactgctgctttgggctttctggtttccccagtccagtcgcgcactttttattgtcatttccctacctcctctgtctcctgtggttgggaacatgaactactctttgatcatggccttcaattcctacagacacccactctgaagatcaggactgctgattgggcacggtggctcattcctgtagtcccagcactttgggaggctgaggcgggtggatcatgaggtcaggagatcgagaccatcctggctaacatggtgaaaccccgtctgtaaaaatacagaaaaattagccgggcatggtggtgggcgcctgtagtcccagctactcgggaggctgaggcaggagaatggctggagcccaggaggcggaacttgcagtgagctgagatcacaaccactacactccagcttgggcaacagagtgagcctccatcccccaaaaaaaaaaaaaaaaaaaaaatcaggactgctttctctattcctgcttctggttagatgctgaagtggcacttgcgttagagcaaagagaaacctctgtccaggtactctgttggttataatctaaatacttagcaaaattctacaccttatttgaaataatcaaaatttattttcattgtttttagaaacttgatggataacctgtatgaagagatctttgttgagaaatttaaaaaataattgtgactatttcttggatgacttttttttttaataggttctaatattctcctggctagaatggcaactagaaaagcaaaaccagatgggcagtaccacctaaaaccagaagaagtagatgattttatcagaggccagctagtgaccaatctaccaggtaaatagaaatattttaacaatacttttattacaggcattacaagtacttttcatatctataatatagaactgtgagacctctttttgcccagacatgaatataaaaatttttaagtcttattgagtgccatgaaaaacaaaatttggaattctgcattaaatatcccctaaaatgatttgtcaggaccttaatgttacatttttgttttgcttctattcagttttactttaggtatttctcaagtagcaagattctaagaaacaatgttaaaagggaggatgatgaaattgactttcagtcctttaaataaatgattattgaaatagtttactcctgggctaaagataaaagttttgagcttcgattctcctatgtcatgctgcaggactagcgacagttttctgagtttattaaacaagtacttttaaaagtataaatagaatgtgtgtgagctgtattaggaaaaaggaaacgtaaagaaggattgtgttttcaattaactccactcatggaaaaaaaccttccatcttaacctttctcacctaaggggcaggatgttcagttatttcatatttttgtgtagttacctatttattataaagtgcctctgtcagctttgtaaagtcttccatcttcatttatagtgaaagttttaaaattcatttgttaaaagtagatttagtggcatttttagatgcctatttttaagcctaataaaagtatgtccgaactaacttagaagtttctgttaacaggccataaatattaaacgacagaaatggcattttatggtaggttagttttaaagcttcctgacccccgtagtatataacttaaaacgatgtattagtgtcagaaatgtgtaatatgacatttttgatggttagtttcacatttaatttgagaatactttataaaatcaaactagcaaattactgtagtagacaacacagtttaaacatttttaataagaaatcttactgaagttttatataagaaggaactggtatatttaaagttgcatgtaaaatttgagttttaagtttattacactagccatctgtattagttttctaggggtgccataacaaagtaccacagactggggtgcataaacaacagaaatgcgttgtctcacagttctggaggctggaagttcaagatcaaggtgtcagcagggttggctctttctgaagcctctgcttggcttgtaggtgaccctcctctccctgtgtcttcacatggccttccccatatgcatgtctccgtcctgatctcttcttgtgaggataccagtcatgttggattaggctcatcaatatgaccttgttttatcttaattaccctttaaagattctgtgtccaaatacagtcacactgtggccgggcatggtgactcacacctgtaatcccagcactgtgggaggccgaggcagatggatcatttgaggccaggagttcaagaccagcctggccaacatggtgaaaccctstctctactagaactacaaaaaaaattagctgggggtaggtggcacatgcctgtagtcccagctactcaggaggctgaggcacaagaatcgcttgagcccgagaggcagaggttgcagcgagccaagatcgcaccactgcactccagcatgggtgacagagtgagactgtgttgaaaaaaacaaaacaaaaacaaatacagtcacatggtgaagtactggggtcaggacttcagcatataaatttggggaagacacagtttagtccaaaacaccatctttaaatcgaaccctttttgtagttttctttgttttaatagaaatagggacgttttagctacttgacctagtaatcctaccattcaccttcatttgcttcctggctggaaagactttatttctttttttttttttttttttttgagatggagtcttgctctgttgcccaggctagagtgcaatggtgcgatctcggctcactgcaagctctgccttctgggttcacgccattctcctgcctcagcctcccgagtagctgggactacaggcacccaccacacagccggctaattttttgtatttttagtagagatggagtttcacctctgtctcggtctcctgacctcatgatccgcccgcctcggcctcccaaagtgctgggattataggcatgagccaccgtgcccagtgagactttatttcttgaagggcaagtgtgaagttacatgtcctggccaagctgaggcacagccttgaatttcctaagggagatttgaaagatagggcagcagagttggccttctcttcttcagagccaggttctgtattgctcacagtggttcatgtggttttcataaaatccccaaatccttaacctgactgttatagaacatttcaggtctataaaatatctcccttctccattgttactcctgtcctgaagtgtgttccacagattataagctgttcctttaaaaaggggtttcatataggagagggaaccttctgtggtggaggggtttgtacagtgaaagtcctgggaattattttagaaaagaaacctatttatctttgttaaagactagtaatttctcaaagatatttggtgataaatatacagtacctatttatatcttgtggaacacgctttggaggaacttggctctctaaccataaccaggagaaattcagtggtaacttgccccatctccaacctctttagtcccttgtacccataaatgtttagtgaccacatacgtgctgcgcacagtaataaacaattagaataactacataagaaggaaaaacacaatagtaagtttttgctttaggagactccacagaataataattgtgtattacactaataaatacgtttcttaatatgatccggttacctaatgaaagaaaggattgaccccaacgactattacagtttgaagaaccatttctactttttctctggatctttgcagggctttttacctgcgcatgcactcttcaatgaagggccctctgcacctcattcagcctttgctaggtttgtgcatctagcatatggattccctctctatcccattttcagagaaccaccatgatcatgtaggcattcataaagtctgcactaatacagtagctacgtagccaagtgaagctagtacaatatgagttaaattaaagttaaataaaactaccagttcagttcctcactgccctggccacatkgcaagtgctcagtggtcacatggagcaaggttctcctgtattggatagcagacgagaacatttccatcactgcagaaagttcagttgaacagcactcctgtagatggtgaaaactttattctttgaagtttactcctctatgtctgtattggatagccaagttctggatgccaaggaggggacattattggccacttttaacctagggtaatagttccccttcaaggacagatgccaagtctttgtcccagttgcttgaccaggagcctccttgactctctcttcgttgagatttgattctaaaagagcatattttccttcaccttttccttaataggtggctgcactctttgggcccggagccccccttactttgtccatagagttgccatctttcccttataaacacctacttaattgacgtatttagttaaaactagcagccctcttcaaggttttggtcctggctccaagtttaattttcccacccccactcaataggagttggaggtacaccacaygccctgcctccctcccccacctccggttcaggccatttcattccatcagatgagcctgcatggagaagaactgtgcttctttcatagagggatgtccacttagattagattgattacggttaacttggtgatgtttaatatagcctttcctttgcacctgtagtgcataatttgttgtggtatactcaagatactctaaaattttaaactatggggtttccaccccaacacatggacacactaacacaacccaggatgatgattgtctcttgctaatcttggaagtccctgagaacagatttgttccccagaactgtaacggaaagatcatggtcagattatgggagtgggaagtgaggcaatagtgggagggacaaaagagagacacaaagtcttccctgatgttaagaagtcttatgacaaaaaagaaataacaaaaagagcaaattgaagaaaaaagtctttcttaaaagcaaatagctgtgcaaagtgtctacctttgacaaacccaagtatgtaatttgtctattcccttgtgtttctcctccccattttgaaaagcacttaggtttcacttaaaattttaccttttggtgaatggtacttctctggaggaatttttttttttttttaaattgttaactcggggtctttggtatttacttgccctttgttctggcttggactttaaaatggcacaattgtgaacgagcacgcttaacgccttcatctcacttccattaaggaataaagtgtctgggtttaaacttgtctgacccacattgatgacttcctaaccttgtgttatatactggttccagaggttttcctggcagaacttggactagatagtttttctgctactgaagaccactcaggaggatgggagctatgaacagaagttagcagacttcactctgagctctcttttttaaacacagggtcttgttctgtcacctaggctggaatggaatggcaggttcatagcttactacagcctcaaactctcgggctcaagggatctttccaactcagcctcccaagtagctgggactacaggagcgcaccaccacacccagctaattcttttttctattttatagagacggtctacctcagttgcccatgttgtcctcaaactcagactgttggcctcccaaagtattgggattacaggtgtgagccaccacacccagcctgagttctcttttgataagttcctacagaagaccagaaacacaacgctgtcttttcctcattgatggaaaatttttacttgatggtgtggaaccattttaataagcattatagtttccctcagttactccaaacctctttcccaaatttgtggacctttttaaagcatttagggcaaattgaagaaaaccaagactccaacttagagcaacagaattaatcagtatcctttaggtggggctcaaacgttacatcttgcagaataggacatagggactgctgcctgctggcccagctgtaggagagttcatatctcttcagagagatcatccttttgattaaaaaaaaagtctgtcttctaccccaaccaccagttggtttggttagggtccttcatcttcaggtcagtggtatgtgtgatagcatgtaacatttctggactttggcccattttgtgaattcttgttctgtttttcactgaaaaaatgtggctgataccactgtgagatttggtgatgaccgaaatcataatagatcccttacatttcgtgagttggttagtatgtctgtaagtcacactatagacttgtttaaatgacagttgattccttagttgattttgtgactaagatacatatcttggtattattcactaataaagaaagtgacatttttgataacttgagttatacatattttaaaagtttctggttcatctatatgtggagtccaaattgagaagtagagtctagaaatacatctactagcatgattttgcaccaaaaaattcttcagcctgtggatgcttcagttatgttgcctaaagactttaaagattattttaaactagttgttttgtgcataaatggtgggtattttgtgttaataaacttgttattagtagcttattctgcatacttaactatattccctttcctaggagttggacattcartggaatctaagtkggcatctttgggaattaaaacttgtggagacttgcagtatatgaccatggcaaaactccaaaaagaatttggtcccaaaacaggtcagatgctttataggttctgccgtggcttggatgatagaccagttcgaactgaaaaggaaagaaaatctgtttcagctgagatcaactatggaataaggtttactcaggtactgatcattgaacagattttgccatctgttgctctttatatttttacatagtcctacctctacaactaaaccattagaccctcratgcttgaaattaagtcttaaaactgttgtatccccagagccttaagaaggccttttaaggcactgtgtggtaaggtgtagccccagataagactgagactgaggaaacttagctcttggggaaatatactaaaagattatgctttggaggccagttattagagaacttgagattataattattctaattaacagtgaaaaaataaaaaagatgagaaaaatatttttaatgttgaaatattttttaagctgtagttaaaattaagtttcagcaaacccctccttatgcaagcttttggaaagctgcagcacagatggctgagtagtttccattttccttcagattatggatttggatatgttttkttttttttttttttttttttgagatggagtctcactttgttgcccagggtggagtctcactttgttgcccagggtggagtgcagtggcgcagtctcggctcactgcaacctccgtttcccagattcaagagattctcctgcctcagcctcccaagtagctgggattacaggcacccgccaccacgcccggctaattttttgtacttttagtagagacgtggtttcaccgtgttggccaggctggtctcaaactcctgaccttgtgatctgcccgcctcagcctcctaaagtgctgggattacagatgtgagccactgcgcccggctggatatgtcttgaatttgtatgtacaaacaacaccatatcataaggatttgaaatgtgatgagttaattaccctctgtgcctacactgtggacctcaggagttttgtttccttaggcatggagatagatgatgtttgggctgtaagcacagtgttggaacacacattttattagcagaacttattaacatagttacaaaagaattttcgacaagtcagtgatggcatagaaaagaaagaaaggggccctatgcggtggctcacacctgtaatcccagcactttgggaggctgaggcaggccgatcacctgaggtcaggagttggagaccagcctggccaacatggtgaaaccccgtctctactaaaaatacaaaaaaattagccagacattgtggcaggcgcctgcaatcctagctactcgggaggctgaggaaggagaatcacttgaacctgggaggcggaggttgcagtgagccgagatcatgctattgcacttcagcctgggggacaagaatgagactgtctcaaaaaaaaaaaaaaggaaagaaaggaaaaatatcttttaaaagtactcattactttcactttgttgggaaggtgggtatttgtatttaatagttgagggtataccaaacagtttttgttgttgtagttttacttttttgagacggagtctccctctgtcgcccaggctggaatgcagtggcatgatctcagctcactgcaacctccgtctcctgggttcaagcgattctcctacctcagcctcctgagtagctgcgattacaggcacccgccaccacgccaggctaatttttgcatttttagtagagatgaggtttcaccacgttggccaggctggtctcgaactcctgacctcagacgaatccaccagcctcggcctctcaaagtgctgggattacaggtgtgagccaccgcgcctggccacgtttctttttaatagatgctgagcgtgatagtgagtaaccaacatgtttaatattcaaagttaaaatacttgagaacaattattaggtatataggaaagyggaatggtagtttctccacgtttgtctttccatagccaaaagaggcagaagcttttcttctgagtctttcagaagaaattcaaagaagactagaagccactggcatgaagggtaaacgtctaactctcaaaatcatggtacgaaagcctggggctcctgtagaaactgcaaaatttggaggccatggaatttgtgataacattgccaggtaagstcacctcagaaatgatattggtaattatatttcagtacaggttgttgtaagtaatagaaaatgaagaaaaccaaggaggagtttgaataaagacctgtaaacccgttaatctggtattctgtagaagcaggcatcagcccaaggcattcagcttaggttaatgcacttggtttcagcgaggcccacacacaggaggttggtttgacggcaytgctgaccttggcagcctttgcttggcatctttgggctgttaactttactgcatggacagaaagaaagggcaaggctgcagaccaaagggactgctatagtttcgggacttggtgaaacttttttcctgaggaaaatttcaatgtagttcttaaaaacaatgatacaggccaggtgtggtggctcatacctgtaatcccagcactttgggaggctgaggcagctggatcacttgaggccaggaatttgagaccagcctggccaacatggtgaaactccatttccactaaaagtacaaaaattagccggacatggtggcattcgcctgtagtcccagctactcaggaggctggggcaggaggattgcttgaacccaggaggcagaggttgcagtgagctgagatcgcgccagtgcactcctgcctgggcaacagagcaacattctgtctcaaaaaaatgatacacaaaggcagactatagtagctagaaaaatgatggtgaaggagagcaacttcatttacataggtgtatacatttaattggtaaaaagatgaatgaatcactgtaatgtctgaaaactggtaaaagcatttaaaaacgctgttttttttggggggggggggggttgtttgttttgagacagagtctggctctgtcacccaggcctgagggcagtggtgcgatctcggctcattgcaacttctacctcctgggttcaagcaatcctcctgtctcagcctgttgggtagctgggattatggggcatgccaccatgcccagcgaatttttgtattttcagtagagatagggtttcactatgttggcaaggctgatcttgaactcctgacttcaaatgatccgcccaccgcagcctcccatagtgttgggattacaggcatgagccaatgtgcccggtctgaaacactcgtcttttatgtcagggccaactacttaatattaaacttcatgtaagattcgtgaccaatatgaagatgtgtggttttacatgtcattttatattgcactgtatttcatctgtgaaaccaaaattttgagacttttgacactgaaagctacttacaatatgaagtatagtttcattaaagattagctcatgccaaccatacatggtgcattcatgtatatgatgatattgctaagtcgtgagacgactgctcttaaacagagaaactcccaagttaccatgaaagcaggaattataaattacaattagagaacataatttataaaatacattttttatcagttggttatcttgaattatatttacctacctgttatgatacacatgtatctcaaatagtaaatagtggtcatttatttatttactttaaaaacttatttatgtagagacaggatctcgctctgttgcccaggctggccttgaacaatccttttgccttgacctcccagcgttttgggattacaggtgtgagccactgtgctcagcttttagtggttatttctataagcagatgaagtaatgtgattatcttcttaaacatttctatgggaaaatccaattcaatttataataattttttctgggaatatttcttgtttaatggcctggaacttcatttgttcattatacatggaaaggatcatccaaaacacgaaataactttcctttggaaagagaactggtagtaatttgttaatctgttactgagttagtaattctgtttgcaatgggacagcccgctcatgccagagaagctcaaaaggctctgaaggaaatggtgggtgaggtcagcacatctttgagacctaataatgctgatggaccatttggtcctccttcaagagttcttaaagatctaagaattgtttattggctgtactgtaaacacaatgaaaggagagtcaagaaacaacatacagagaatttatctttctcttctgaatatttgctatacctcagcatacataatcttggaacctaaaacttctcttggaatcaagaacattgtgtttaccattcacttgtgctttagctggaaaatatgtatttatttgtgcatatgttagctaaaatctacctttttctaaatttctcaacttatttttagttgacctaagtgtccattacggtttttamcttaaagttctagtgttccataatttttctttcccccttggttgccagtgtaactaatttggtatttctggcttccttgaagggagactatggcattcacttttataatcttctttgtaactgtttacaacttttctataactcttttaaacagttccatactactttagtactagtgaatacatatggaatgaagcttttgttttttaattctatcacttacaggactgtaactcttgaccaggcaacagataatgcaaaaataattggaaaggcgatgctaaacatgtttcatacaatgaaactaaatatatcagatatgagaggggtaagtatatagtaacattgtaaattctgactttgtgtaatgtatctctcatttttgaggcttgctctcaaaagggttattgctggtgtatagggactttatatgtaggtctttagctgctttgtaatacaaggaaaagagaaacaaaaattcttgacttcctccattttgacctccttcattttagaataattttcttagattcttactgtacttttccaaggtacccctgattaaccaggggctaatatacatgtcttccctgttcttgtttcctagaagtagatatgactgtgaggaatatgaatacataaattttgtacctttaagttcctttttaatcagaaacatactctgcatctgctgtatgatgacctagaagggagtgaaaccacaggcacatcaagatgcctttgaaacaggcaagaggcatcaaaatgtcaaaaccatagatttttgtgtggggttttttttttttgagacagtttttgccctgttgcccaggctggagtgcaatggcgttgtatcggctcactgcaacttccgcctcctgggttcaagcaattctccttcttcagcctcccgagtagctgggggtacaggcacccgctaccacgcccagctaattttttgtatttttggtagagatgaggtttcaccatgttggccaggctggtttcaaactcctgacctcaggtgatccacccacctcagcctctcaaagtgctgggattacaggcacttgcccccatctctactaaaaatacaaaaattagccgggtgtggtggtgcatgcctcatagtcccagctactcgggaggctgaggcaggagaatcacttgaacccaagaggcagagcttgcatgagccaagatcgtgccaccgcactccagcctgagtgacacagtgaggctctgtctcaaaaaaaaaaaaaaaaaaaaaaaaaaagaacctttgtaggtttagttttatgtgtgcatatgtaagtaaagggttgttctggcttgatgtgggctttgttgaaagattagtcactaagccagccgtaattgtgatttctccctgaaatactgttataatggcactttatggaggggtctgcagtgtacctgctgttcatcactcccgccaatattttttgagaagtatttcatttaaaaaagataaaaatagtgaagtttccaagtagactgtcctctcttaatttttttttatcctaatttaaaaccttagttgacgagaacatcagtggaatacagtattccacttgtttggattttctgattttaaagatcttttggtatattttgggagaattggatactctgaagtttgagatgaatgaccactcactagctactttagaaattgtttttgtaataagtcatatagaatgctgtttgaatactttcatttacctttattctagaaacaggatccaggagatagtgaaaaggatttgctgaggattttgcttagctgaattcatattttcactttagttttcctagaagcatactctttattctgggttctaggttgggattcacgtgaatcagttggttccaactaatctgaacccttccacatgtcccagtcgcccatcagttcagtcaagccactttcctagtgggtcatactctgtccgtgatgtcttccaagttcagaaagctaagaaatccaccgaagaggagcacaaagaaggttggtggtcatcartgtggttcttttttaggtgctgcttatgtccttggaaagacggcagttggttttaaaattgacacagctttatgtgattttaaaaatttatattcttcattatgatgaatcagtaataaagtttttttatttgtaatggacagaggattaaaggycctgcccgatgatctgaagaggctattttatatattttctttttgtagtatttcgggctgctgtggatctggaaatatcatctgcttctagaacttgcactttcttgccaccttttcctgcacatctgccgaccagtcctgatactaacaaggctgagtcttcagggaaatggaatggtctacatactcctgtcaktgtgcagtcgagacttaacctgagtatagaggtcccgtcaccttcccaggtacatttttgtagtcctaaatataagtacattttatactcctaaatataaatacaaaaatacaagtttacaaatgaaaatggcatttttatttcttcatcygtttaaccaagaaagggagaacgggccacttgtttgggtagatcatgatgttggattctaaataagcaatatttgggttgagtgaaagtgcttttgcaaagatttgccactcttgcaagttgtaaagcatagctgaaaggcagtcctcctgtggactgccattgtctgtgacagtggtcatcatgcagacttactgtattcagcaaggcagctttggtgattagtggtgaagtagaggccttatgtcgaagggtttttgcagtatttgcaaacaggtctctggagatttggatggtttaattcagcgtgtgtgggctgtacatgtgatatactgctggtccttgaaagtaaggtagcaccttaagctatattgggcaagtttatttgtgcctctgctccccctgcatggaaggaggcggaaggagatgttaaatactggctgcaaaactaggggaaagggcaatgctgatatgcttgtatggcgacagatacccacaattagttactcctggcaagataagattggtccacccagttgatgggattgcatgtttccaaagggccagatgtggatgcacaggtaggccctggccaaaggaacagtggattctgtcctgtaagttagagaaaattcagcttctagaaaccctttcttccagtgtgctgctctcagagtagaattatttgtatttttgggcagtctctcatctgaaaggtgaacttttgacccaggactgttacctgtccagaattttaacatgtgcctcaggccttcacccctccctggggtgggatctaatttgagcttcaccaaggctattcatatctgttggccccaattgcaggacattctgtgagtatatttggacttacctggtcatgtgatagtggctggtagtatatatacacttctttccagactacacatagtacttcaggcttcaatgacaaaaggccaagacgttccaaaaatgtgctgatttggaggtggctttcctagcttgatggtctgtaccttacattgattatccacagtattcaaattgaaatttaaagtggcgtgttaactcccaaacacctcatctcngagcatgctttaacttcctactcatatgtttggcattttatagctggatcagtctgttttagaagcacttccacctgatctccgggaacaagtagagcaagtctgtgctgtccagcaagcagagtcacatggcgacaaaaagaaagaaccagtaaatggctgtaatacaggaattttgccacaaccagttgggacagtcttgttgcaaataccagaacctcaagaatcraacagtgacrcaggaataaatttaatagcccttccagcattttcacaggtaagttaaatatgggaaccctctgctgtagtttcaatattctcacccccctgctccaacttaggacctgtctcacttccctttctcctctgtatctgacaccacatccactggggaggggaggggaggggaggggagagtgggcttgtctccatctcctgcatytgmaggatgtagacacagagcagcctcccgctgaagcagcagggaagagacgggggagggcatgctaagacagaaacacactgatctggggcaaacacatcaatggccacacttgaatacaacagagcggagatgtataatcctgcatgggggacagtaacaacctgagtccctgtttcaatgttttgcttcccattttctactagtgcattttgcccaggttctgctgttgtagtgggtttctttaagttagtactcttaattccttattcttgctcttaattccttattcttgctctaaccattttgaagatttaatcagctttgatattggggaactgttaagaattcgtacagatcagaaaagtgagatttgaaaacaaagtctgttttgkgaaaaagagaaaccagctaccatctacaattagctcaggtttgactttgacctcgtcttttccactaggtggaccctgaggtatttgctgcccttcctgctgaacttcagagggagctgaaagcagcgtatgatcaaagacaaaggcagggcgagaacagcactcaccagcagtcagccagcgcatctggtgagccttggaagtggcatgtaacaaaaatgaagacaaagagtaatggagtcactgttgtctaattattgcagtatataatgggcaaagtctaagctgttgcattaagagctcttcatattgggataatatctgaagtatacagtatgagtaaatatcatcatatttctagttggatttgtgtctgtactttcaggatttaaacacaccactttttactttttaaaaagttggaataggacattaccacaaatgtcttaaatacttgttcagctagttgtcctttgagatgaatacattaaaggatgttggttcaaaatgcatcacaaacatcaaacccacatttagtactacccatcatagatgagcaacatgccaaaggtcaaattagtaagtggcaaagcaaagagagaattggagagcctgtactttgggccattgccattcactgcctctcacttggggcaggaggggaggtgtaggctagggagcctgttgtatttgggaggagaaaagagaacccaatactgtcatccagactatccatactatcattttgttgaggatcttatatccatctgctcttagtgccaaagaatmctttacttcatctaaaggcagcagtgaaagaaaaraaaagaaasaagaagaaaaaaaccatyggttcaccaaaaaggattcagagtcctttgamtaacaagctgcttaacagtcctgcaaaaactcygccaggggcctgtggcagtccccagaagttaattgatgggtttctaaaacatgaaggacctcctgcagagaaacccctggtaattccttaactttgacctttatgagatcttaatatacctggataatgtgtgaatatagcaattttatcctttgttttcttaacaggaagaactctctgcttctacttcaggtgtgccaggcctttctagtttgcagtctgacccagctggctgtgtgagacctccagcacccaatctagctggagctgttgaattcaatgatgtgaagaccttgctcagagaatggataactacaatttcaggttggcttggcctgtgttagatggcccaaggctgagatgtagtcgtctcatgatttgagaacataaacagactaaactatgcagatttaacccatttctctaactctgataagcttaaagcagctacccccaaatcttttaaattctgggacttgctttgaaaagtaacaaagcccattcctttgatagctgttagtgacatagttgtagaaatgcagttttcctttatccatgcagatctctgactttctccttcaaaaagactggtcctcatttgaagtttttcccccttcctagatccaatggaagaagacattctccaagttgtgaaatactgtactgatctaatagaagaaaaagatttggaaaaactggatctagttataaaatacatgaaaaggtagtaattcatcacttttatcaaatgggaaaaaatggcatgtcacaatggctgagggtgtactgagttgttttaaactttctgggaaactgtactcattagggttaatgagaaagtgatatcctttattttgccatgttgactaagtagcaaataaggttccaaatatgttgccctcaaggtcttacatgtgattaaaaaaccataggaagtgggctgggcacagtggctcacgcctgtacttcacttcgggaggctggggtgggtggatcgtttgagaccagcctggccaaaatggcataaccccatctctactgaaaaatacaaaaaataaataatctgggggggtggtggtgcccacctgtggtcccagttacttgggaggtggaggctgcggtgaaccatgattgcaccactgcatggctccagcctgatcgacagcttgtctcaaaacaaaataaaaaaaaatttgagtgttctaggattttattttttttgagatggagtctcactctgtcgcccaggctggagtgcagtggcaggatcttggcttactgcagcctctgcctcctgggttccagtgactctcctgcctcagcctcccgggtagctgggattataggcatgtgccaccatgcccacctaatttttctattttttgtagagacggggttttaccatgttggccaggctggtctcaaactcctgacctcaggtgatccgccctcctcggcctcccaaagtgctgggattacaggcatgagccacaccgcacctggccaggacttttttttttttttgccaaagtcaatttttatatataaaaaggaataattagycttaaggacctttcctaattcctaatgacatttcttctctccccacctttaggctgatgcagcaatcggtggaatcggtttggaatatggcatttgactttattcttgacaatgtccaggtggttttacaacaaacttatggaagcacattaaaagttacataaatattaccagagagcctgatgctctctgatagctgtgccataagtgcttgtgaggtatttgcaaagtgcatgatagtaatgctcggagtttttataattttaaatttcttttaaagcaagtgttttgtacatttcttttcaaaaagtgccaaatttgtyagtattgcatgtaaataattgtgttaattattttactgtagcatagattctatttacaaaatgtttgtttataaagttttatggatttttacagtgaagtgtttacagttgtttaataaagaactgtatgtatattttgtacaggctcctttttgtgaatccttaaaaactcaactctaggaagcaactactgtttattatactaaaaggctgaaaaacctccaggccagactgctaagctctgaaattcctgagaggtctcagaccgggattctacttgttccaagaaagggtaaagcttctaaaccatcttattcttgtctccaagcatgaacacaggagcatgttaagaaaatctttactacttcttccatgcggagaaatctacatattttgaattagaaacaccctcacacccacttgaagatttttttcctgggaacattatgtcccrtagatcagaggtggtgktgtctttttgcttctactggccattgagaaactttgatgataaaaaagaacggtatagatttttcaaacgtatataaaatatttttatgttatatgttatgccataactttaaaataaaaatagtttaaaattctatgctagtggatatttggaactttttcctcaaacaaacaccccacactgacttcagcaaaaccctaaaactagctacagattactactacgaatgaatcattaagttttgtgtctgcaacaatttagaagcactaagcccaaatatcaggaaatgtgtgtatgatggaattttctaggacaaaacagatcaagattaaaacagatcaagattaatgtataaaaatstctactaaaacagatcaagattaaaacagatcaagattaatgtataaaaatctctactgttaccaggtgctggcatacaaggtagtgtgatgatagtttagtttgtaagataattcttgtcctaggaggacaacttgtgggagagaagctacactaacatggaagcctaacagagcttgcttactggtggatgtctgttttctttattggtagtttggtttagaattgtgatgattacaatggactcgtgactacacaagcagtaaaaagcagccagctgtgcttttacaccatggtttcacacaaagcagctaaagaaatatcagaatgcctaattttctattttataaaagccctaaaggcatatggcagaagaatgctggaaaaatcactgtgggaagaatatgcataaataaagaagtatttcttacgtcaaaaaagtcccaagaatcacaaaatctgcagaagcttgkttaatcaaatactgcagtactgatttaatcagtataaaatcraaagagctttagatctgtaataaaaatccaaatttggggaagggcaaactttaaaacagcagccaagtagagaagggttggggaagggagaggtgagtgaacaggcacattggaactgtggggacatgtaactgaccactgtcaaaccagtgtaagtttcttggtttctcatggaaaacattttatacacctatttttcttccttccatacttaagtccatcagtgtccaaatacgtctgttccattttttgtctgatttttgttgggatattacaacacagtattgcatttactccagttcctgctccatgtgaaaaaattagatgatttcaaatactttcttcagctccacaataagctgccagtcactcttctgcatttcatctctgaaccagtctttgagtgcatcaatggactgccggctgatctgcaatgcccgaggcacaaacagggtaaacagaacataacaaacgtgccaaagaaagctgtggccccagatgcccgctctcactgtactaaaaagcttaagcagaaataaaaaacagggcttgcctgcctaagggagtagaattccaaaatcacatctggtttgcatgtcaggcacgaggggacctaaaagtcctagctttctctgttggtgctgctttcctgatagagcaacttcctcaacagacaaggcccagctagaggtcaagccctaatgggggatccagtcccatcagattctacaatcaaactgaagcccaaggagctacaggtacaggtgacccaagaagagtgattccctgttgcttaaagtgtgccacttttgctgaaatacttaccttactaacaagaatatctgtagcttcaaaatgtcttccaaacattttgggtgactcaccagggataggttctatttttacacaaacttcttgtcctttttttgcaacatccacttgtttatggtttatttcaatacttgttactattccgatgtcaacaaactataaaataagaacaaattaaaatgcatgcagaagaattcatgccaatcacaggcgccatggctggatagctgaagtaagaactagagcaaaagcctgttttaaaagtcatggcagtgcgatcctttcatcactcacggtgtaacattttggtaaactaggctggcaccaccaacaccctattcccttcatgatggttgtaagaatgacaggagataatgtgctttgcaaaacattccaagtgccctgttgacccaatgtcatttcctatttttgctctaccatttcacgtgacaggtgccgtaataggagggatcagcaggcacaaagggtctgagtcaggaatgagcttgaagtggctgatgggaatgaagtcagagtgaggaccaatcctgaaattttaagaatgatggcctgtgagcagatgagtgatgtgatctcagagtttggggcaaaaaaccctgactcctttgtggagaaaaagattcaggagagtaagagtgaaaacagggagagctctggttggtttaggaggccaaagccacatagaaagtaacacaaataaatgtccaggcttagtccactgaaatggtagaaaagcaatgacaacttctaagtgccattgcccattacaagaaccaggtttgggccagggaaagtactagatgaggctggaacatctcaaccagaaaggaagatgatgctcagactgctgtgtgtcaaggatacaggagccagttgagctcctactgaccacaatagaaaatctgagtatcaaaagaataaaggtaatggattatattaaaaaaaaaaaaacccactgagtctatgactcaataaaaaggtcagtgggaagaggttctttgtaagaaatggggggacaggtatatccacaattttgcaaccatctacgtaatagttgacttaggcaacgcttgccagtgggtactaaaggcactgggataaaggctgttgagaaacaggatatccattaggaactccaggtaccagacagattacagagtaattataaaggggcaagtttctaatggagatggttggcgtctagcactttccccaggaaatcagagcatcagcagcagtcagacaggctgggtcatgcaagaggcaggcacacagggaaactgcatgagtgtctttccaataattctaacctgtgtctagttgggagggagagaaacagataaatccaaatggaggagggatttgcaaaacaacagggacacttcaaaaagaatggaggactgttcttgactgaggctcagccacaaaacaagccccagtgcaatgcagcttgcagggcactgggccagattggtggggagagttaccaaaacatctttggaataactggtgaaataatgttgagggctgcaaattataggatattgttgaaatattattaatttttcttaggtatgctgacagaaagggaaggtaaacatgagtgttcattatactagtttttaaacttttccacaggcttgaaacctttcaaaataaaataaaaggcaataatgtaaagtgccttggagccccaattaactgaagcactgagatcagcactgagtcaacactgactatggagcactgatatttaccaatactgaagcacaacagaaggtgacaggctctgcttgttttaaagttaccacattttcttcctactgaggtaaaaacactgaaacatttgttaagaaggtggagaccacactaaatacacagcacagtactgtgaactacaggcacaaagctgtgttggtacgactcttggacactcatttagtgctttaagaaatgacccacagaatgtacaactagaacttacatttttgcttgggacacacatgggtgtcccctgtttcacctgacctgcttccaccgtcacccccatcactatcggatctcgagaattaaaaatgtactgagggaggatttttatcttgcagggaaatactgctatgtgcctgaaaggaaaaaagaaaagaattttaagcttacagaatcacttaaacataaaaagaaaaactgcagctgaacatcaggcttctcccattagaggaaagcagctttccccagcggccacaggagaggggcaggcagggtgctgcagcccagggccaccccatgcccagagcgcttcttccttgttcttaacctcctcctccccattctgttgcttcccaagtctttgctttcttctcttttaaagccctacctccaaaagaagctgcatcacaggagcattctgttcctagtctaaaacactgagcttggctgctgaagatgtcagccacagtctggggcttagaacctaggcagtacctggtgacaggcaggtcttcgttaggcacatatgtaggctactgggggatcacataggcatcagaccgtattatcaccctccttttctccaccacgttcccaaaccattgatccaaaaggccactacataactaccctgcttattgagcacacgcttaaaatgctttaaaagtttccagcagtcttgttaagtagaattcttctcacttcaggtttcatgatctaaagtgagcatataccagtctaaatcctaatatttactagtaagctccacttaaaaatgtatcccaaactacgccatcactcctatcatcactgtggtctgaatcacctagacctcttgcttggactgtgggagcctcctgacaggctcttgccactgacttcctaacaacccaaggtccacataacaacccaattaaccagtctgattgtgaacacacagccttggcaatggcttcttgcaaaactcagagaagctcaatccctcccatggcctgtaagatccttgacgatacaggtcctgccaccctctctgacctcatttatcactgtcccttctggtcactctgcctcgcactgctgttctctctggacactccccatgtgcctgtgtggcttactctgtctgaagaggtgagatgccttcccaaaccacatcattaatcacagtccctcctctccttatctaggcccttccctgctttatttggtttttcagcacttctcaacatgtgtcaattgtcctgcaataagagcatgtcccagaccaggcacagtggcttacacctataatcccagcactttgggaggcagaggcaggtggatcacttgagctcaggagttcaagaccagcctggccaacatggcgaaaccctatctctaccaaaaatacaaaaaattagccaggcatagtggtgtgagcctgtagtctcaactactcgggaggccaaggtgggaggatcacttgagcccagtaggcagaggttggggtgacccatgatcatgccactgtactgcagcatgggtgacagaacgagaccctgtctcaaagggaaaggaggagggaggctggcctggttctctgctgatgcctcctctaccactgcagcaatgtaggtactgtgagtgcttgagtgaaagtttggtagaggaatggacttctctcccacagaatctcttatttcccggttttcctcactcaagttttgttacttccaatctatataatcccagatgagcaacataaagtccctacatttaataactacgaacccattaacaagacccaagtctgccaagattattaaactgaagtcacagacaagacttgtttgcatactgctggaatgtccccagtatgttgggtttctggtttgtaacacaccatttcaggatgcagcctctggtagatgagtaaatgccatgattttgctgtttacagccctttctggaattcagtaattctcaatcatgttcattaacaaagactcaaagtaaataaaaacagtaacttacttaaattcttcttgtttctgtttcttgtagtcttgtctatattttgtaaaggcatcaaataaatgataaataatttctgcactaaaaattctaactcctaaactatcagccatttcttgtgcatctcgttcaattctcacatcgaaggccaaaattactgcatacctaaaaggttaaaacacatcaaagaccattcagtgaaaaacagagtatgtcacagaggacagttttttaagataggacagttttaagatagctacgtaacatgaaagccttcatagcaagagaaattacttactgagggtcatgttccaacatcactgaagccttcataacatcttttttatgcactgggccaatgttaattcctgcatactgaaaaaatgggagtttccatgtttatctgtatgtatcaggtaatggcgatggcaccaaaaaccacgaccaaccaccattcacttgtggagcgagttgtagttacttacgggcacttctgatgttttcagaaattccagtagagcttccaaagaacccagygtagatgcctggacatagactcctttttcttctaatttgatagcatttagtgtctgctttaactcatggatcaattcatccttgaaaagaaatcagatttgataaggttgtcaacacacctctatcctcagcagtctagaattaaattgtgtttctctctttggttaagtactcatctgcaaatatgaaactaaggcttagatagagcaaggcatcacagaacctgtgctggaatgaaggaggagatttcggggccataccctaactgtatttcgcttcacctttgtcttaggtttactaactttgaaatatgtttaatc
